(19) United States
(12) Patent Application Publication
(10) Pub. No.: US 2010/0093715 A1
(43) Pub. Date: Apr. 15, 2010

(54) Plant productivity enhancement by combining chemical agents with transgenic modifications

(75) Inventors: Dirk Voeste, Limburgerhof (DE); Egon Haden, Kleinniedesheim (DE); Bryan McKersie, Raleigh, NC (US); Xi-Qing Wang, Chapel Hill, NC (US); Timothy Hudelson, Durham, NC (US)

Correspondence Address: BRINKS, HOFER, GILSON & LIONE, P.O. BOX 1340, MORRISVILLE, NC, 27560, US

(73) Assignee: BASF SE, Ludwigshafen (DE)

(21) Appl. No.: 12/596,856

(22) PCT Filed: Apr. 23, 2008
(86) PCT No.: PCT/EP08/54924

§ 371 Date: Oct. 21, 2009

Related U.S. Application Data
(60) Provisional application No. 60/913,349, filed on Apr. 23, 2007.

(51) Int. Cl. A01N 51/00; A01N 43/56

(52) U.S. Cl. 514/229.2; 514/407; 514/341; 514/365

(57) ABSTRACT

The present invention relates to the enhancement of plant productivity by combining chemical agents with transgenic modifications.

[0001] The present invention relates to the enhancement of plant productivity by combining chemical agents with transgenic modifications.

[0002] Chemical amendments and transgenic modifications can both increase plant performance. Chemical agents can be applied e.g. as a seed coating or as a spray on a growing plant. When applied as a coating, chemical amendments may improve seed resistance to biotic and abiotic stresses and stimulate and/or improve germination as well as early germination. Seedlings are thus better able to establish in the greenhouse or the field. Spray applications on growing plants may affect growth by e.g. enhancing plant metabolism, inducing plant vigor, modifying plant canopy and stem architecture, or by improving fruit set.

[0003] Many products that enhance plant performance or improve grain quality and quantity are on the market. For instance, fipronil is a broad-spectrum insecticide from the insecticide chemistry class of phenyl pyrazoles. It is highly effective against all major insect pests in crop and non-crop markets. The most important applications are soil and seed treatment in crops and termite control in non-crops. Fipronil has been reported to enhance overall root system and root hair development, increase tiller number and productivity, increase photosynthetic capacity (plant greenness), increase leaf area and plant height, stimulate early flowering and grain maturation leading to significant increases in yield (Fipronil-Worldwide technical Bulletin, BASF).

[0004] Transgenic plants, such as Round-up ready crops, have exhibited enhanced productivity, primarily due to elimination of competition for water and nutrients with weeds. Round-up ready crops are not susceptible to the herbicide when applied at field rates (24-32 oz/A). Most weeds are susceptible to the herbicide, allowing more of the available nutrients to be sequestered by the crop plants and, therefore, increase yield.

[0005] Combinations of chemical, physical, biological, and transgenic approaches are used in integrated pest management (IPM). For example, a transgenic plant with increased resistance is the so called Bt corn (Bt=Bacillus thuringiensis), which has been modified to increase levels of certain crystal proteins. Bt is effective at controlling Lepidoptera larvae, most notably the corn borer (http://www.extension.umn.edu/distribution/cropsystems/DC7055.html#ch2). The protein is selective, generally not harming insects of other orders, such as the Trichogramma minutum wasp, which is also used to control corn borer (http://ipmworld.umn.edu/chapters/chippen.htm). Crops carrying the Bt gene, therefore, have been considered compatible with biological control programs.

[0006] A combination of a transgenic event having activity against corn rootworm and treatment of the seed with certain pesticides provides unexpectedly synergistic advantages to seeds having such treatment, showing unexpectedly superior efficacy in the protection against damage by corn rootworm is disclosed in U.S. Pat. No. 6,593,273.

[0007] According to the teaching of the WO1999035913 treating transgenic useful plants which carry one or more genes expressing a pesticidal active ingredient, or which are tolerant against herbicides or which are resistant against the attack of fungi, with a nitroimino- or nitroguanidino-compound for controlling pests, has a synergistic effect on the pests to be controlled.

[0008] A method for increasing the vigor and the yield of an agronomic plant is known from US 20030060371, US 20040023081 or US 20030114308. The method includes treatment of a plant with herbicides or other pesticides, whereby the plant is a transgenic plant having a transgenic event that confers resistance to the herbicide or pesticide which is employed.

[0009] The advantages of applying chemicals and/or chemical compositions comprising at least one active ingredient on the transgenic plants themselves to improve performance, however, are unknown. There is no known product system, which combines agrochemical application with transgenic modifications to enhance plant productivity and grain quality.

[0010] Object of the present invention is a new process for increasing plant health and/or controlling pests.

[0011] A further object is a method which integrates chemicals and transgenic material to improve plant performance.

[0012] The object is achieved according to the invention by providing the present method. Summarized, the present invention relates to a method for increasing plant health and/or controlling pests in plants with at least one transgenic modification related to yield increase as compared to a corresponding wild-type plant comprising treating the location where the plant with at least one transgenic modification is growing or is expected to grow and/or the transgenic plant with at least one transgenic modification or propagation material of the plant with at least one transgenic modification with an effective amount of a chemical composition comprising at least one active ingredient.

[0013] In one embodiment of the invention the method of the invention comprises
[0014] a) treating the location where the plant with at least one transgenic modification is growing or is expected to grow and/or treating the plant with at least one transgenic modification or propagation material of the plant with at least one transgenic modification with an effective amount of a chemical composition comprising at least one active ingredient and
[0015] b) cultivating a transgenic plant with increased plant health and increased productivity as compared to a corresponding non-treated plant and growing said plant under conditions which permit the development of the plant.

[0016] In one embodiment the invention is related to a method for increasing plant productivity which comprises an increase in plant health and/or pest control.

[0017] Surprisingly, it has now been found that treating that plant with at least one transgenic modification related to yield increase with an effective amount of a chemical composition comprising at least one active ingredient results in a synergistic effect.

[0018] Synergistic effect in the present context means that

a) the use of a pesticide in combination with a transgenic modification exceeds the additive effect, to be expected on the pests to be controlled and thus extends the range of action of the active ingredient and of the active principle expressed by the transgenic plant and/or
b) results in an increase in plant health and increased yield.

[0019] The term “synergistic”, however, is to be understood in this connection as synergistic pesticidal activity and/or synergistic plant health effects.

[0020] Synergistic pesticidal activity means extension of the pesticidal spectrum of action to other pests, for example to resistant strains; and/or reduction in the application rate of the pesticides, and/or sufficient control of the pests with the aid of the pesticides even at an application rate of the pesticides alone and the transgenic plant alone are entirely ineffective.

[0021] In one embodiment of the invention at least one transgenic modification of said plant does not confer resistance to the active ingredient which is employed.

[0022] According to the present invention, “increasing the plant productivity” means that certain plant traits are increased or improved by a measurable or noticeable amount over the same factor of the control, e.g. the plant produced under the same conditions, but without the application of the present invention, such as selected from the group consisting of: delay of senescence, root growth, longer panicles, increased or improved plant stand, the plant weight, plant height, emergence, improved visual appearance, improved protein content, more developed root system, tillering increase, increase in plant height, bigger leaf blade, less dead basal leaves, stronger tillers, greener leaf color, pigment content, photosynthetic activity, less fertilizers needed, less seeds needed, more productive tillers, earlier flowering, early grain maturity, less plant verse (lodging), increased shoot growth, early and improved germination, improved vitality of the plant, improved quality of the plant, improved quality of the fruits or vegetables (or other products produced by the plant), improved self defence mechanism of the plant such as induced tolerance against fungi, bacteria, viruses and/or insects.

[0023] Synergistic pest control means as stated above that the use of a pesticide in combination with a transgenic modification exceeds the additive effect, to be expected on the pests to be controlled and thus extends the range of action of the pesticides and of the activity caused by the transgenic modification expressed by the transgenic plant and may be accompanied by effects such as improved self defence mechanism of the plant such as induced tolerance against fungi, bacteria, viruses and/or insects, but is not limited to improved self defence mechanism of the plant such as induced tolerance against fungi, bacteria, viruses and/or insects.

[0024] Pests mean not only insects, nematodes or arachnids but also phytophatogenic fungi.

[0025] In one embodiment of the invention, increased plant productivity means plants with improvements in fresh weight (FW), dry weight, and/or plant volume.

[0026] In one embodiment of the invention, increased plant productivity means e.g. plants with increased internode length, representing better plant growth and/or green vs. yellow plant material, representing greater photosynthetic capacity than the control.

[0027] In one embodiment of the invention, increased plant productivity means plants with increased greenness, internode length, leaf angle, implying that leaves were laying flatter and thus received more photosynthetic radiation, and/or increased plant area, representing more leaf surface area for photosynthesis than the control.

[0028] In one embodiment of the invention, increased plant productivity means plants with increased the yield and/or improved vigor.

[0029] In one embodiment of the invention, increased plant productivity means plants with an increase in any of the aforementioned traits or any combination of two or more of the aforementioned traits.

[0030] In one embodiment of the invention, an increased yield means an increase in a trait selected from the group consisting of biomass production, grain yield, starch content, oil content or protein content.

[0031] In one embodiment of the invention, an increased yield is obtained based upon an increase in plant productivity, e.g. increased plant health and/or pest control.

[0032] According to the present invention, “increased plant health” means that certain plant characteristics are increased or improved as compared to the wild-type plant such as selected from the group consisting of: delay of senescence, root growth, longer panicles, plant weight, plant height, emergence, improved visual appearance, protein content, oil content, starch content, more developed root system (improved root growth), reduced ethylene (reduced production and/or inhibition of reception), tillering increase, increase in plant height, bigger leaf blade, less dead basal leaves, stronger tillers, greener leaf color, pigment content, photosynthetic activity, less input needed (such as fertilizers or water), less seeds needed, enhanced plant vigor, more productive tillers, earlier flowering, early grain maturity, less plant verse (lodging), increased shoot growth, increased plant stand and early and better germination, improved vitality of the plant, improved quality of the plant, improved quality of the fruits or vegetables (or other products produced by the plant), improved self-defense mechanism of the plant such as induced and improved tolerance against stress factors such as heat stress, cold stress, drought stress, UV stress and/or salt stress. Advantageous properties, obtained especially from treated seeds, are selected from the group consisting of improved germination and field establishment, better vigor, more homogen field establishment. Advantageous properties, obtained especially from foliar and/or in-furrow application are e.g. improved plant growth and plant development, better growth, more tillers, greener leaves, larger leaves, more biomass, better roots, improved abiotic stress tolerance of the plants, more grain yield, more biomass harvested, improved quality of the harvest (content of fatty acids, metabolites, oil etc.), more marketable products (e.g. improved size), improved process (e.g. longer shelf-life, better extraction of compounds), improved quality of seeds (for being seeded in the following seasons for seed production); or any other advantages familiar to a person skilled in the art.

[0033] In one embodiment of the invention, increased plant health means plants with an increase in any of the aforementioned traits or any combination of two or more of the aforementioned traits.

[0034] In one embodiment the invention provides a method for controlling pests and/or increasing plant health in plants with at least one transgenic modification related to yield increase comprising the application of a composition comprising at least one pesticide to the pests, or to the plant with at least one transgenic modification or propagation material of the plant with at least one transgenic modification.

[0035] According to the present invention, “pest control” or “controlling pests” means in one embodiment efficiently combating one or more pests selected from the group consisting of:

insects from the order of the lepidopterans (Lepidoptera), e.g. Agrotis ypsilon, Agrotis segetum, Alabama argillacea, Anticarsia gemmatalis, Argyresthia conjugella, Autographa gamma, Bupalus piniarius, Cacoecia murinana, Capua reticulana, Chematobia brumata, Choristoneura fumiferana, Choristoneura occidentalis, Cirphis unipuncta, Cydia pomonella, Dendrolimus pini, Diaphania nitidalis, Diatraea grandiosella, Earias insulana, Elasmopalpus lignosellus, Eupoecilia ambiguella, Evetria bouliana, Feltia subterranea, Galleria mellonella, Grapholitha funebrana, Grapholitha molesta, Heliothis armigera, Heliothis virescens, Heliothis zea, Hellula undalis, Hibernia defoliaria, Hyphantria cunea, Hyponomeuta malinellus, Keiferia lycopersicella, Lambdina fiscellaria, Laphygma exigua, Leucoptera coffeella, Leucoptera scitella, Lithocolletis blancardella, Lobesia botrana, Loxostege sticticalis, Lymantria dispar, Lymantria monacha, Lyonetia clerkella, Malacosoma neustria, Mamestra brassicae, Orgyia pseudotsugata, Ostrinia nubilalis, Panolis flammea, Pectinophora gossypiella, Peridroma saucia, Phalera bucephala, Phthorimaea operculella, Phyllocnistis citrella, Pieris brassicae, Plathypena scabra, Plutella xylostella, Pseudoplusia includens, Rhyacionia frustrana, Scrobipalpula absoluta, Sitotroga cerealella, Sparganothis pilleriana, Spodoptera frugiperda, Spodoptera littoralis, Spodoptera litura, Thaumatopoea pityocampa, Tortrix viridana, Trichoplusia ni and Zeiraphera canadensis,
beetles (Coleoptera), e.g. Agrilus sinuatus, Agriotes lineatus, Agriotes obscurus, Amphimallus solstitialis, Anisandrus dispar, Anthonomus grandis, Anthonomus pomorum, Aphthona euphoridae, Athous haemorrhoidalis, Atomaria linearis, Blastophagus piniperda, Blitophaga undata, Bruchus rufimanus, Bruchus pisorum, Bruchus lentis, Byctiscus betulae, Cassida nebulosa, Cerotoma trifurcata, Cetonia aurata, Ceuthorrhynchus assimilis, Ceuthorrhynchus napi, Chaetocnema tibialis, Conoderus vespertinus, Crioceris asparagi, Ctenicera ssp., Diabrotica longicornis, Diabrotica semipunctata, Diabrotica 12-punctata Diabrotica speciosa, Diabrotica virgifera, Epilachna varivestis, Epitrix hirtipennis, Eutinobothrus brasiliensis, Hylobius abietis, Hypera brunneipennis, Hypera postica, Ips typographus, Lema bilineata, Lema melanopus, Leptinotarsa decemlineata, Limonius californicus, Lissorhoptrus oryzophilus, Melanotus communis, Meligethes aeneus, Melolontha hippocastani, Melolontha melolontha, Oulema oryzae, Otiorrhynchus sulcatus, Otiorrhynchus ovatus, Phaedon cochleariae, Phyllobius pyri, Phyllotreta chrysocephala, Phyllophaga sp., Phyllopertha horticola, Phyllotreta nemorum, Phyllotreta striolata, Popillia japonica, Sitona lineatus and Sitophilus granaria,
flies, mosquitoes (Diptera), e.g. Aedes aegypti, Aedes albopictus, Aedes vexans, Anastrepha ludens, Anopheles maculipennis, Anopheles crucians, Anopheles albimanus, Anopheles gambiae, Anopheles freeborni, Anopheles leucosphyrus, Anopheles minimus, Anopheles quadrimaculatus, Calliphora vicina, Ceratitis capitata, Chrysomya bezziana, Chrysomya hominivorax, Chrysomya macellaria, Chrysops discalis, Chrysops silacea, Chrysops atlanticus, Cochliomyia hominivorax, Contarinia sorghicola Cordylobia anthropophaga, Culicoides furens, Culex pipiens, Culex nigripalpus, Culex quinquefasciatus, Culex tarsalis, Culiseta inornata, Culiseta melanura, Dacus cucurbitae, Dacus oleae, Dasineura brassicae, Delia antique, Delia coarctata, Delia platura, Delia radicum, Dermatobia hominis, Fannia canicularis, Geomyza Tripunctata, Gasterophilus intestinalis, Glossina morsitans, Glossina palpalis, Glossina fuscipes, Glossina tachinoides, Haematobia irritans, Haplodiplosis equestris, Hippelates spp., Hylemyia platura, Hypoderma lineata, Leptoconops torrens, Liriomyza sativae, Liriomyza trifolii, Lucilia caprina, Lucilia cuprina, Lucilia sericata, Lycoria pectoralis, Mansonia titillanus, Mayetiola destructor, Musca autumnalis, Musca domestica, Muscina stabulans, Oestrus ovis, Opomyza forum, Oscinella frit, Pegomya hysocyami, Phorbia antiqua, Phorbia brassicae, Phorbia coarctata, Phlebotomus argentipes, Psorophora columbiae, Psila rosae, Psorophora discolor, Prosimulium mixtum, Rhagoletis cerasi, Rhagoletis pomonella, Sarcophaga haemorrhoidalis, Sarcophaga spp., Simulium vittatum, Stomoxys calcitrans, Tabanus bovinus, Tabanus atratus, Tabanus lineola, and Tabanus similis, Tipula oleracea, and Tipula paludosa
thrips (Thysanoptera), e.g. Dichromothrips corbetti, Dichromothrips ssp., Frankliniella fusca, Frankliniella occidentalis, Frankliniella tritici, Scirtothrips citri, Thrips oryzae, Thrips palmi and Thrips tabaci,
termites (Isoptera), e.g. Calotermes flavicollis, Leucotermes flavipes, Heterotermes aureus, Reticulitermes flavipes, Reticulitermes virginicus, Reticulitermes lucifugus, Reticulitermes santonensis, Reticulitermes grassei, Termes natalensis, and Coptotermes formosanus,
cockroaches (Blattaria-Blattodea), e.g. Blattella germanica, Blattella asahinae, Periplaneta americana, Periplaneta japonica, Periplaneta brunnea, Periplaneta fuligginosa, Periplaneta australasiae, and Blatta orientalis,
bugs, aphids, leafhoppers, whiteflies, scale insects, cicadas (Hemiptera), e.g. Acrosternum hilare, Blissus leucopterus, Cyrtopeltis notatus, Dysdercus cingulatus, Dysdercus intermedius, Eurygaster integriceps, Euschistus impictiventris, Leptoglossus phyllopus, Lygus lineolaris, Lygus pratensis, Nezara viridula, Piesma quadrata, Solubea insularis, Thyanta perditor, Acyrthosiphon onobrychis, Adelges laricis, Aphidula nasturtii, Aphis fabae, Aphis forbesi, Aphis pomi, Aphis gossypii, Aphis grossulariae, Aphis schneideri, Aphis spiraecola, Aphis sambuci, Acyrthosiphon pisum, Aulacorthum solani, Bemisia argentifolii, Brachycaudus cardui, Brachycaudus helichrysi, Brachycaudus persicae, Brachycaudus prunicola, Brevicoryne brassicae, Capitophorus horni, Cerosipha gossypii, Chaetosiphon fragaefolii, Cryptomyzus ribis, Dreyfusia nordmannianae, Dreyfusia piceae, Dysaphis radicola, Dysaulacorthum pseudosolani, Dysaphis plantaginea, Dysaphis pyri, Empoasca fabae, Hyalopterus pruni, Hyperomyzus lactucae, Macrosiphum avenae, Macrosiphum euphorbiae, Macrosiphon rosae, Megoura viciae, Melanaphis pyrarius, Metopolophium dirhodum, Myzus persicae, Myzus ascalonicus, Myzus cerasi, Myzus varians, Nasonovia ribis-nigri, Nilaparvata lugens, Pemphigus bursarius, Perkinsiella saccharicida, Phorodon humuli, Psylla mali, Psylla piri, Rhopalomyzus ascalonicus, Rhopalosiphum maidis, Rhopalosiphum padi, Rhopalosiphum insertum, Sappaphis mala, Sappaphis malt, Schizaphis graminum, Schizoneura lanuginosa, Sitobion avenae, Trialeurodes vaporariorum, Toxoptera aurantiiand, Viteus vitifolii, Cimex lectularius, Cimex hemipterus, Reduvius senilis, Triatoma spp., and Arilus critatus.
ants, bees, wasps, sawflies (Hymenoptera), e.g. Athalia rosae, Atta cephalotes, Atta capiguara, Atta cephalotes, Atta laevigata, Atta robusta, Atta sexdens, Atta texana, Crematogaster spp., Hoplocampa minuta, Hoplocampa testudinea, Lasius niger, Monomorium pharaonis, Solenopsis geminata, Solenopsis invicta, Solenopsis richteri, Solenopsis xyloni, Pogonomyrmex barbatus, Pogonomyrmex californicus, Pheidole megacephala, Dasymutilla occidentalis, Bombus spp., Vespula squamosa, Paravespula vulgaris, Paravespula pennsylvanica, Paravespula germanica, Dolichovespula maculata, Vespa crabro, Polistes rubiginosa, Camponotus floridanus, and Linepithema humile,
crickets, grasshoppers, locusts (Orthoptera), e.g. Acheta domestica, Gryllotalpa gryllotalpa, Locusta migratoria, Melanoplus bivittatus, Melanoplus femurrubrum, Melanoplus mexicanus, Melanoplus sanguinipes, Melanoplus spretus, Nomadacris septemfasciata, Schistocerca americana, Schistocerca gregaria, Dociostaurus maroccanus, Tachycines asynamorus, Oedaleus senegalensis, Zonozerus variegatus, Hieroglyphus daganensis, Kraussaria angulifera, Calliptamus italicus, Chortoicetes terminifera, and Locustana pardalina,
Arachnoidea, such as arachnids (Acarina), e.g. of the families Argasidae, Ixodidae and Sarcoptidae, such as Amblyomma americanum, Amblyomma variegatum, Ambryomma maculatum, Argas persicus, Boophilus annulatus, Boophilus decoloratus, Boophilus microplus, Dermacentor silvarum, Dermacentor andersoni, Dermacentor variabilis, Hyalomma truncatum, Ixodes ricinus, Ixodes rubicundus, Ixodes scapularis, Ixodes holocyclus, Ixodes pacificus, Ornithodorus moubata, Ornithodorus hermsi, Ornithodorus turicata, Ornithonyssus bacoti, Otobius megnini, Dermanyssus gallinae, Psoroptes ovis, Rhipicephalus sanguineus, Rhipicephalus appendiculatus, Rhipicephalus evertsi, Sarcoptes scabiei, and Eriophyidae spp. such as Aculus schlechtendali, Phyllocoptrata oleivora and Eriophyes sheldoni; Tarsonemidae spp. such as Phytonemus pallidus and Polyphagotarsonemus latus; Tenuipalpidae spp. such as Brevipalpus phoenicis; Tetranychidae spp. such as Tetranychus cinnabarinus, Tetranychus kanzawai, Tetranychus pacificus, Tetranychus telarius and Tetranychus urticae, Panonychus ulmi, Panonychus citri, and Oligonychus pratensis; Araneida, e.g. Latrodectus mactans, and Loxosceles reclusa,
fleas (Siphonaptera), e.g. Ctenocephalides felis, Ctenocephalides canis, Xenopsylla cheopis, Pulex irritans, Tunga penetrans, and Nosopsyllus fasciatus,
silverfish, firebrat (Thysanura), e.g. Lepisma saccharina and Thermobia domestica,
centipedes (Chilopoda), e.g. Scutigera coleoptrata,
millipedes (Diplopoda), e.g. Narceus spp.,
Earwigs (Dermaptera), e.g. forficula auricularia,
lice (Phthiraptera), e.g. Pediculus humanus capitis, Pediculus humanus corporis, Pthirus pubis, Haematopinus eurysternus, Haematopinus suis, Linognathus vituli, Bovicola bovis, Menopon gallinae, Menacanthus stramineus and Solenopotes capillatus.

[0036] According to the present invention, “pest control” or “controlling pests” means in one embodiment efficiently combating the pest selected from the group consisting of: phytopathogenic fungi, including soil-borne fungi, which derive especially from the classes of the Plasmodiophoromycetes, Peronosporomycetes (syn. Oomycetes), Chytridiomycetes, Zygomycetes, Ascomycetes, Basidiomycetes and Deuteromycetes (syn. Fungi imperfecti).

[0037] According to the present invention, “pest control” or “controlling pests” means in one embodiment efficiently controlling the plant diseases selected from the group consisting of:

Albugo spp. (white rust) on ornamentals, vegetables (e.g. A. candida) and sunflowers (e.g. A. tragopogonis); Alternaria spp. (Alternaria leaf spot) on vegetables, rape (A. brassicola or brassicae), sugar beets (A. tenuis), fruits, rice, soybeans, potatoes (e.g. A. solani or A. alternata), tomatoes (e.g. A. solani or A. alternata) and wheat; Aphanomyces spp. on sugar beets and vegetables; Ascochyta spp. on cereals and vegetables, e.g. A. tritici (anthracnose) on wheat and A. hordei on barley; Bipolaris and Drechslera spp. (teleomorph: Cochliobolus spp.) on corn (e.g. D. maydis), cereals (e.g. B. sorokiniana: spot blotch), rice (e.g. B. oryzae) and turfs; Blumeria (formerly Erysiphe) graminis (powdery mildew) on cereals (e.g. on wheat or barley); Botrytis cinerea (teleomorph: Botryotinia fuckeliana: grey mold) on fruits and berries (e.g. strawberries), vegetables (e.g. lettuce, carrots, celery and cabbages), rape, flowers, vines, forestry plants and wheat; Bremia lactucae (downy mildew) on lettuce; Ceratocystis (syn. Ophiostoma) spp. (rot or wilt) on broad-leaved trees and ever-greens, e.g. C. ulmi (Dutch elm disease) on elms; Cercospora spp. (Cercospora leaf spots) on corn, rice, sugar beets (e.g. C. beticola), sugar cane, vegetables, coffee, soybeans (e.g. C. sojina or C. kikuchii) and rice; Cladosporium spp. on tomatoes (e.g. C. fulvum: leaf mold) and cereals, e.g. C. herbarum (black ear) on wheat; Claviceps purpurea (ergot) on cereals; Cochliobolus (anamorph: Helminthosporium of Bipolaris) spp. (leaf spots) on corn (C. carbonum), cereals (e.g. C. sativus, anamorph: B. sorokiniana) and rice (e.g. C. miyabeanus, anamorph: H. oryzae); Colletotrichum (teleomorph: Glomerella) spp. (anthracnose) on cotton (e.g. C. gossypii), corn (e.g. C. graminicola), soft fruits, potatoes (e.g. C. coccodes: black dot), beans (e.g. C. lindemuthianum) and soybeans (e.g. C. truncatum or C. gloeosporioides); Corticium spp., e.g. C. sasakii (sheath blight) on rice; Corynespora cassiicola (leaf spots) on soybeans and ornamentals; Cycloconium spp., e.g. C. oleaginum on olive trees; Cylindrocarpon spp. (e.g. fruit tree canker or young vine decline, teleomorph: Nectria or Neonectria spp.) on fruit trees, vines (e.g. C. liriodendri, teleomorph: Neonectria liriodendri: Black Foot Disease) and ornamentals; Dematophora (teleomorph: Rosellinia) necatrix (root and stem rot) on soybeans; Diaporthe spp., e.g. D. phaseolorum (damping off) on soybeans; Drechslera (syn. Helminthosporium, teleomorph: Pyrenophora) spp. on corn, cereals, such as barley (e.g. D. teres, net blotch) and wheat (e.g. D. tritici-repentis: tan spot), rice and turf; Esca (dieback, apoplexy) on vines, caused by Formitiporia (syn. Pheffinus) punctata, F. mediterranea, Phaeomoniella chlamydospora (earlier Phaeoacremonium chlamydosporum), Phaeoacremonium aleophilum and/or Botryosphaeria obtusa; Elsinoe spp. on pome fruits (E. pyri), soft fruits (E. veneta: anthracnose) and vines (E. ampelina: anthracnose); Entyloma oryzae (leaf smut) on rice; Epicoccum spp. (black mold) on wheat; Erysiphe spp. (powdery mildew) on sugar beets (E. betae), vegetables (e.g. E. pisi), such as cucurbits (e.g. E. cichoracearum), cabbages, rape (e.g. E. cruciferarum); Eutypa lata (Eutypa canker or dieback, anamorph: Cytosporina lata, syn. Libertella blepharis) on fruit trees, vines and ornamental woods; Exserohilum (syn. Helminthosporium) spp. on corn (e.g. E. turcicum); Fusarium (teleomorph: Gibberella) spp. (wilt, root or stem rot) on various plants, such as F. graminearum or F. culmorum (root rot, scab or head blight) on cereals (e.g. wheat or barley), F. oxysporum on tomatoes, F. solani on soy-beans and F. verticillioides on corn; Gaeumannomyces graminis (take-all) on cereals (e.g. wheat or barley) and corn; Gibberella spp. on cereals (e.g. G. zeae) and rice (e.g. G. fujikuroi: Bakanae disease); Glomerella cingulata on vines, pome fruits and other plants and G. gossypii on cotton; Grainstaining complex on rice; Guignardia bidwellii (black rot) on vines; Gymnosporangium spp. on rosaceous plants and junipers, e.g. G. sabinae (rust) on pears; Helminthosporium spp. (syn. Drechslera, teleomorph: Cochliobolus) on corn, cereals and rice; Hemileia spp., e.g. H. vastatrix (coffee leaf rust) on coffee; Isariopsis clavispora (syn. Cladosporium vitis) on vines; Macrophomina phaseolina (syn. phaseoli) (root and stem rot) on soybeans and cotton; Microdochium (syn. Fusarium) nivale (pink snow mold) on cereals (e.g. wheat or barley); Microsphaera diffusa (powdery mildew) on soybeans; Monilinia spp., e.g. M. laxa, M. fructicola and M. fructigena (bloom and twig blight, brown rot) on stone fruits and other rosaceous plants; Mycosphaerella spp. on cereals, bananas, soft fruits and ground nuts, such as e.g. M. graminicola (anamorph: Septoria tritici, Septoria blotch) on wheat or M. fijiensis (black Sigatoka disease) on bananas; Peronospora spp. (downy mildew) on cabbage (e.g. P. brassicae), rape (e.g. P. parasitica), onions (e.g. P. destructor), tobacco (P. tabacina) and soybeans (e.g. P. manshurica); Phakopsora pachyrhizi and P. meibomiae (soybean rust) on soybeans; Phialophora spp. e.g. on vines (e.g. P. tracheiphila and P. tetraspora) and soybeans (e.g. P. gregata: stem rot); Phoma lingam (root and stem rot) on rape and cabbage and P. betae (root rot, leaf spot and damping-off) on sugar beets; Phomopsis spp. on sunflowers, vines (e.g. P. viticola: can and leaf spot) and soybeans (e.g. stem rot: P. phaseoli, teleomorph: Diaporthe phaseolorum); Physoderma maydis (brown spots) on corn; Phytophthora spp. (wilt, root, leaf, fruit and stem root) on various plants, such as paprika and cucurbits (e.g. P. capsici), soybeans (e.g. P. megasperma, syn. P. sojae), potatoes and tomatoes (e.g. P. infestans: late blight) and broad-leaved trees (e.g. P. ramorum: sudden oak death); Plasmodiophora brassicae (club root) on cabbage, rape, radish and other plants; Plasmopara spp., e.g. P. viticola (grapevine downy mildew) on vines and P. halstedii on sunflowers; Podosphaera spp. (powdery mildew) on rosaceous plants, hop, pome and soft fruits, e.g. P. leucotricha on apples; Polymyxa spp., e.g. on cereals, such as barley and wheat (P. graminis) and sugar beets (P. betae) and thereby transmitted viral diseases; Pseudocercosporella herpotrichoides (eyespot, teleomorph: Tapesia yallundae) on cereals, e.g. wheat or barley; Pseudoperonospora (downy mildew) on various plants, e.g. P. cubensis on cucurbits or P. humili on hop; Pseudopezicula tracheiphila (red fire disease or, rotbrenner, anamorph: Phialophora) on vines; Puccinia spp. (rusts) on various plants, e.g. P. triticina (brown or leaf rust), P. striiformis (stripe or yellow rust), P. hordei (dwarf rust), P. graminis (stem or black rust) or P. recondita (brown or leaf rust) on cereals, such as e.g. wheat, barley or rye, and asparagus (e.g. P. asparagi); Pyrenophora (anamorph: Drechslera) tritici-repentis (tan spot) on wheat or P. teres (net blotch) on barley; Pyricularia spp., e.g. P. oryzae (teleomorph: Magnaporthe grisea, rice blast) on rice and P. grisea on turf and cereals; Pythium spp. (damping-off) on turf, rice, corn, wheat, cotton, rape, sunflowers, soybeans, sugar beets, vegetables and various other plants (e.g. P. ultimum or P. aphanidermatum); Ramularia spp., e.g. R. collo-cygni (Ramularia leaf spots, Physiological leaf spots) on barley and R. beticola on sugar beets; Rhizoctonia spp. on cotton, rice, potatoes, turf, corn, rape, potatoes, sugar beets, vegetables and various other plants, e.g. R. solani (root and stem rot) on soybeans, R. solani (sheath blight) on rice or R. cerealis (Rhizoctonia spring blight) on wheat or barley; Rhizopus stolonifer (black mold, soft rot) on strawberries, carrots, cabbage, vines and tomatoes; Rhynchosporium secalis (scald) on barley, rye and triticale; Sarocladium oryzae and S. attenuatum (sheath rot) on rice; Sclerotinia spp. (stem rot or white mold) on vegetables and field crops, such as rape, sunflowers (e.g. S. sclerotiorum) and soybeans (e.g. S. rolfsii or S. sclerotiorum); Septoria spp. on various plants, e.g. S. glycines (brown spot) on soybeans, S. tritici (Septoria blotch) on wheat and S. (syn. Stagonospora) nodorum (Stagonospora blotch) on cereals; Uncinula (syn. Erysiphe) necator (powdery mildew, anamorph: Oidium tuckeri) on vines; Setospaeria spp. (leaf blight) on corn (e.g. S. turcicum, syn. Helminthosporium turcicum) and turf; Sphacelotheca spp. (smut) on corn, (e.g. S. reiliana: head smut), sorghum and sugar cane; Sphaerotheca fuliginea (powdery mildew) on cucurbits; Spongospora subterranea (powdery scab) on potatoes and thereby transmitted viral diseases; Stagonospora spp. on cereals, e.g. S. nodorum (Stagonospora blotch, teleomorph: Leptosphaeria [syn. Phaeosphaeria] nodorum) on wheat; Synchytrium endobioticum on potatoes (potato wart disease); Taphrina spp., e.g. T. deformans (leaf curl disease) on peaches and T. pruni (plum pocket) on plums; Thielaviopsis spp. (black root rot) on tobacco, pome fruits, vegetables, soybeans and cotton, e.g. T. basicola (syn. Chalara elegans); Tilletia spp. (common bunt or stinking smut) on cereals, such as e.g. T. tritici (syn. T. caries, wheat bunt) and T. controversa (dwarf bunt) on wheat; Typhula incarnata (grey snow mold) on barley or wheat; Urocystis spp., e.g. U. occulta (stem smut) on rye; Uromyces spp. (rust) on vegetables, such as beans (e.g. U. appendiculatus, syn. U. phaseoli) and sugar beets (e.g. U. betae); Ustilago spp. (loose smut) on cereals (e.g. U. nuda and U. avaenae), corn (e.g. U. maydis: corn smut) and sugar cane; Venturia spp. (scab) on apples (e.g. V. inaequalis) and pears; and Verticillium spp. (wilt) on various plants, such as fruits and ornamentals, vines, soft fruits, vegetables and field crops, e.g. V. dahliae on strawberries, rape, potatoes and tomatoes.

[0038] Further harmful fungi are selected from the group consisting of: Ascomycetes such as Ophiostoma spp., Ceratocystis spp., Aureobasidium pullulans, Sclerophoma spp., Chaetomium spp., Humicola spp., Petriella spp., Trichurus spp.; Basidiomycetes such as Coniophora spp., Coriolus spp., Gloeophyllum spp., Lentinus spp., Pleurotus spp., Poria spp., Serpula spp. and Tyromyces spp., Deuteromycetes such as Aspergillus spp., Cladosporium spp., Penicillium spp., Trichorma spp., Alternaria spp., Paecilomyces spp. and Zygomycetes such as Mucor spp., and in addition in the protection of stored products the following yeast fungi are worthy of note: Candida spp. and Saccharomyces cerevisae.

[0039] According to the present invention, “pesticide” means a composition comprising in free form or in agrochemically useful salt form as active ingredient and at least one auxiliary.

[0040] In one embodiment the invention relates to compositions and to the use of these for controlling harmful plants.

[0041] According to the invention, the term “transgenic plant” means a plant with transgenic modification.

[0042] A “plant with transgenic modification” means a plant whose genetic material has been altered using techniques in genetics generally known as recombinant DNA technology.

[0043] The plant has at least one transgenic modification as compared with the wild-type plant, but it may have further transgenic modifications, so in total 2, 3, 4, 5, 6, 7, 8, 9 or even more.

[0044] The term “wild-type” means a plant without the aforementioned modification.

[0045] The terms “wild type”, “control” or “reference” are exchangeable and can be a cell or a part of a plant such as an organelle or tissue, or a plant, which was not modified or treated according to the herein described process according to the invention. Accordingly, the plant used as wild type, control or reference corresponds to the plant as much as possible and is in any other property but in the result of the process of the invention as identical to the subject matter of the invention as possible. Thus, the wild type, control or reference is treated identically or as identical as possible, saying that only conditions or properties might be different which do not influence the quality of the tested property.

[0046] Preferably, any comparison is carried out under analogous conditions. The term “analogous conditions” means that all conditions such as, for example, culture or growing conditions, assay conditions (such as buffer composition, temperature, substrates, pathogen strain, concentrations and the like) are kept identical between the experiments to be compared.

[0047] The “reference”, “control”, or “wild type” is preferably a subject, e.g. an organelle, a cell, a tissue, in particular a plant, which was not modified or treated according to the herein described process and is in any other property as similar to the subject matter of the invention as possible, preferably 95%, more preferred are 98%, even more preferred are 99.00%, in particular 99.10%, 99.30%, 99.50%, 99.70%, 99.90%, 99.99%, 99.999% or more.

[0048] In one embodiment the transgenic plant used according to the invention with at least one transgenic modification as compared to a corresponding wild-type plant is a plant selected from the group according to table A:

TABLE A

| | |
|---|---|
| A1 | a) Plant with one or more increased or generated -activities |
| | in a plant cell conferring an altered trait as compared with |
| | the wild type, |
| | b) Plant with one or more increased or generated activities |
| | in a plant cell conferring an altered trait as compared with |
| | the wild type, whereby said trait is not resistance against |
| | the active ingredient of the invention. |
| A2 | a) Plant with one or more reduced, repressed or deleted |
| | activities in a plant cell conferring an altered trait as |
| | compared with the wild type, |
| | b) Plant with one or more reduced, repressed or deleted |
| | activities in a plant cell conferring an altered trait as |
| | compared with the wild type, whereby said trait is not |
| | resistance against the active ingredient of the invention. |

[0049] The term “activity” of a compound refers to the function of a compound in a biological system such as a cell, an organ or an organism. For example, the term “activity” of a compound refers to the enzymatic function, regulatory function or its function as binding partner, transporter, regulator, or carrier, etc. of a compound.

[0050] The term “plant” includes according to the invention a plant cell, organelle, a plant tissue or a part thereof, such as seed, root, tuber, fruit, leave, flower, plant propagation material etc.

[0051] The term “plant propagation material” as used herein includes all the generative parts of the plant such as seeds and vegetative plant material such as cuttings and tubers (e.g. potatoes), which can be used for the multiplication of the plant. This includes seeds, roots, fruits, tubers, bulbs, rhizomes, shoots, sprouts and other parts of the-plants. Seedlings and young plants, which are to be transplanted after germination or after emergence from soil, may also be included. These plant propagation materials may be treated prophylactically with a plant protection compound either at or before planting or transplanting.

[0052] For the purposes of the invention, as a rule the plural is intended to encompass the singular and vice versa.

[0053] Unless otherwise specified, the terms “polynucleotides”, “nucleic acid” and “nucleic acid molecule” are interchangeably in the present context. Unless otherwise specified, the terms “peptide”, “polypeptide” and “protein” are interchangeably in the present context. The term “sequence” may relate to polynucleotides, nucleic acids, nucleic acid molecules, peptides, polypeptides and proteins, depending on the context in which the term “sequence” is used. The terms “gene(s)”, “polynucleotide”, “nucleic acid sequence”, “nucleotide sequence”, or “nucleic acid molecule(s)” as used herein refer to a polymeric form of nucleotides of any length, either ribonucleotides or deoxyribonucleotides. The terms refer only to the primary structure of the molecule.

[0054] Thus, the terms “gene(s)”, “polynucleotide”, “nucleic acid sequence”, “nucleotide sequence”, or “nucleic acid molecule(s)” as used herein include double- and single-stranded DNA and/or RNA. They also include known types of modifications, e.g., methylation, “caps”, substitutions of one or more of the naturally occurring nucleotides with an analog. Preferably, the DNA or RNA sequence comprises a coding sequence encoding the herein defined polypeptide.

[0055] A “coding sequence” is a nucleotide sequence, which is transcribed into a RNA, e.g. a regulatory RNA, such as a miRNA, a ta-siRNA, cosuppression molecule, a RNAi, a ribozyme, etc. or into a mRNA which is translated into a polypeptide when placed under the control of appropriate regulatory sequences. The boundaries of the coding sequence are determined by a translation start codon at the 5′-terminus and a translation stop codon at the 3′-terminus. A coding sequence can include, but is not limited to mRNA, cDNA, recombinant nucleotide sequences or genomic DNA, while introns may be present as well under certain circumstances.

[0056] As used in the present context a nucleic acid molecule may also encompass the un-translated sequence located at the 3′ and at the 5′ end of the coding gene region, for example at least 500, preferably 200, especially preferably 100, nucleotides of the sequence upstream of the 5′ end of the coding region and at least 100, preferably 50, especially preferably 20, nucleotides of the sequence downstream of the 3′ end of the coding gene region. Using antisense, RNAi, snRNA, dsRNA, siRNA, miRNA, ta-siRNA, cosuppression, ribozyme etc. technology, the coding regions as well as the 5′-and/or 3′-regions can advantageously be used.

[0057] However, it is often advantageous only to choose the coding region for cloning and expression purposes.

[0058] In one embodiment of the present invention, “transgenic modification” means an increased or generated activity of a polypeptide which is the expression product of a coding region of a gene.

[0059] “Polypeptide” refers to a polymer of amino acid (amino acid sequence) and does not refer to a specific length of the molecule. Thus peptides and oligopeptides are included within the definition of polypeptide. This term does also refer to or include post-translational modifications of the polypeptide, for example, glycosylations, acetylations, phosphorylations and the like. Included within the definition are, for example, polypeptides containing one or more analogs of an amino acid (including, for example, unnatural amino acids, etc.), polypeptides with substituted linkages, as well as other modifications known in the art, both naturally occurring and non-naturally occurring.

[0060] Plants and plant cells according to table A1 are disclosed in WO2004018687, WO2004092398, WO2006032708 which are incorporated by reference.

[0061] Plants and plant cells according to table A2 are disclosed in WO2004092349, WO2006032707 which are incorporated by reference.

[0062] The methods for generating such transgenic plants are widely known to those skilled in the art and described, for example, in the publications mentioned above, which are incorporated by reference.

[0063] In one embodiment transgenic plants with at least one transgenic modification as compared to a corresponding wild-type plant used in the process of the invention are plants as disclosed or generated from plant cells as disclosed in the publications as depicted in table B, column 2.

[0064] The publications as depicted in table B, column 2 are herewith incorporated by reference.

[0065] In one embodiment transgenic plants with at least one transgenic modification as compared to a corresponding wild-type plant used in the process of the invention are plants with one or more increased or generated activities selected from the group consisting of the activities as depicted in table B, column 5.

[0066] In one embodiment transgenic plants with at least one transgenic modification as compared to a corresponding wild-type plant used in the process of the invention are plants with one or more increased or generated activities selected from the group consisting of the activities as depicted in SEQ ID NO: 1 to 270 or homologs thereof.

[0067] In one embodiment, the method for producing a transgenic plant with at least one transgenic modification as compared to a corresponding wild-type plant comprises one or more of the following steps
[0068] a) stabilizing a protein conferring the increased expression of a protein encoded by the nucleic acid molecule as depicted in table B, column 1 or 3 or of the polypeptide as depicted in SEQ ID NO: 1 to 270;
[0069] b) stabilizing a mRNA conferring the increased expression of a protein encoded by the nucleic acid molecule as depicted in table B, column 1 or 3 or its homologs or of a mRNA encoding the polypeptide as depicted in SEQ ID NO: 1 to 270;
[0070] c) increasing the specific activity of a protein conferring the increased expression of a protein encoded by the nucleic acid molecule as depicted in table B, column 1 or 3 or of the polypeptide o as depicted in SEQ ID NO: 1 to 270 or decreasing the inhibitory regulation of the polypeptide as depicted in SEQ ID NO: 1 to 270;
[0071] d) generating or increasing the expression of an endogenous or artificial transcription factor mediating the expression of a protein conferring the increased expression of a protein encoded by the nucleic acid molecule as depicted in table B, column 1 or 3 or of the polypeptide as depicted in SEQ ID NO: 1 to 270;
[0072] e) stimulating activity of a protein conferring the increased expression of a protein encoded by the nucleic acid molecule as depicted in table B, column 1 or 3 or a polypeptide as depicted in SEQ ID NO: 1 to 270;
[0073] f) expressing a transgenic gene encoding a protein conferring the increased expression of a polypeptide encoded by the nucleic acid molecule as depicted in table B, column 1 or 3 or a polypeptide as depicted in SEQ ID NO: 1 to 270; and/or
[0074] g) increasing the copy number of a gene conferring the increased expression of a nucleic acid molecule encoding a polypeptide encoded by the nucleic acid molecule as depicted in table B, column 1 or 3 or the polypeptide as depicted in SEQ ID NO: 1 to 270, and/or;
[0075] h) increasing the expression of the endogenous gene encoding the polypeptide as depicted in SEQ ID NO: 1 to 270 or its homologs by adding positive expression or removing negative expression elements, e.g. homologous recombination can be used to either introduce positive regulatory elements like for plants the 35S enhancer into the promoter or to remove repressor elements form regulatory regions. Further gene conversion methods can be used to disrupt repressor elements or to enhance to activity of positive elements-positive elements can be randomly introduced in plants by T-DNA or transposon mutagenesis and lines can be identified in which the positive elements have be integrated near to a gene of the invention, the expression of which is thereby enhanced;
[0076] and/or
[0077] i) modulating growth conditions of the plant in such a manner, that the expression or activity of the gene encoding the protein as depicted in SEQ ID NO: 1 to 270 or the protein itself is enhanced;
[0078] j) selecting of organisms with especially high activity of the proteins of the invention from natural or from mutagenized resources and breeding them into the target organisms, eg the elite crops.

[0079] In one embodiment transgenic plants with at least one transgenic modification as compared to a corresponding wild-type plant used in the process of the invention are plants with one or more increased or generated activities selected from the group consisting of the polypeptides encoded by:
[0080] a) a nucleic acid molecule encoding the polypeptide as depicted in any of the SEQ ID NO: 1 to 270 or the homologs as depicted in SEQ ID NO: 271 to 273;
[0081] b) a nucleic acid molecule as depicted in table B, column 1 or 3;
[0082] c) a nucleic acid molecule, which, as a result of the degeneracy of the genetic code, can be derived from a polypeptide sequence as depicted in table B, column 1 or 3 and/or in SEQ ID NO: 1 to 270;
[0083] d) a nucleic acid molecule having at least 30% identity with the nucleic acid molecule sequence of a polynucleotide comprising the nucleic acid molecule according to a) to c);
[0084] e) a nucleic acid molecule encoding a polypeptide having at least 30% identity with the amino acid sequence of the polypeptide encoded by the nucleic acid molecule of (a) to (c) and having the activity represented by a nucleic acid molecule of (a) to (c);
[0085] f) nucleic acid molecule which hybridizes with a nucleic acid molecule of (a) to (c) under stringent hybridization conditions;
[0086] g) a nucleic acid molecule encoding a polypeptide which can be isolated with the aid of monoclonal or polyclonal antibodies made against a poly-peptide encoded by one of the nucleic acid molecules of (a) to (e) and having the activity represented by the nucleic acid molecule comprising a polynucleotide of (a) to (c);
[0087] h) a nucleic acid molecule encoding a polypeptide comprising the consensus sequence or one or more polypeptide motifs resulting from 2 ore more of the polypeptides as depicted in table B, column 1 or 3 and/or in SEQ ID NO: 1 to 270 and/or a consensus sequence as depicted in SEQ ID NO: 274 to 277;
[0088] h) a nucleic acid molecule encoding a polypeptide having the activity represented by a protein as depicted in table B, column 1 or 3 or 5 and/or SEQ ID NO: 1 to 270;
[0089] i) nucleic acid molecule which comprises a polynucleotide, which is obtained by amplifying a cDNA library or a genomic library using the primers for the polynucleotides as depicted in table B, column 1 or 3 and/or SEQ ID NO: 1 to 270 which do not start at their 5′-end with the nucleotides ATA;
[0090] and
[0091] j) a nucleic acid molecule which is obtainable by screening a suitable nucleic acid library under stringent hybridization conditions with a probe comprising a complementary sequence of a nucleic acid molecule of (a) or (b) or with a fragment thereof, having at least 15 nt, preferably 20 nt, 30 nt, 50 nt, 100 nt, 200 nt or 500 nt of a nucleic acid molecule complementary to a nucleic acid molecule sequence characterized in (a) to (e) and encoding a polypeptide having the activity represented by a protein comprising a polypeptide as depicted in table B, column 1 or 3 and/or SEQ ID NO: 1 to 270.

[0092] In one embodiment transgenic plants with at least one transgenic modification as compared to a corresponding wild-type plant used in the process of the invention are plants with one or more increased or generated activities selected from the group consisting of the yield increasing proteins which confers an increase in yield, plant health and/or plant productivity as compared to a corresponding non-transformed wild-type plant.

[0093] In one embodiment transgenic plants with at least one transgenic modification as compared to a corresponding wild-type plant used in the process of the invention are plants with one or more increased or generated activities selected from the group consisting of the SRP (stress related proteins) which confers an increase in tolerance and/or resistance to environmental stress as compared to a corresponding non-transformed wild-type plant.

[0094] In one embodiment transgenic plants with at least one transgenic modification as compared to a corresponding wild-type plant used in the process of the invention are plants with one or more increased or generated activities selected from the group consisting of the SRP (stress related proteins) which confers an increase in drought resistance as compared to a corresponding non-transformed wild-type plant.

[0095] In one embodiment transgenic plants with at least one transgenic modification as compared to a corresponding wild-type plant used in the process of the invention are plants with one or more increased or generated activities selected from the group consisting of the yield increasing proteins as shown in table B and/or SEQ ID NO: 1 to 270.

[0096] In one embodiment transgenic plants with at least one transgenic modification as compared to a corresponding wild-type plant used in the process of the invention are plants with one or more increased or generated activities selected from the group consisting of the yield increasing proteins as shown in table B and/or SEQ ID NO: 1 to 270.

[0097] As used herein, the term “environmental stress” refers to any sub-optimal growing condition and includes, but is not limited to, sub-optimal conditions associated with salinity, drought, temperature, metal, chemical, pathogenic and oxidative stresses, or combinations thereof. In preferred embodiments, environmental stress is drought and low water content. Wherein drought stress means any environmental stress which leads to a lack of water content in plants, lack of water uptake potential or reduction of water supply to the plants.

[0098] In one embodiment of the invention the term “increased tolerance and/or resistance to environmental stress” relates to an increased resistance to water stress, which is produced as a secondary stress by chilling, freezing, heat, and salt, as a tertiary stress by radiation, and, of course, as a primary stress during drought.

[0099] In a preferred embodiment of the invention the term “increased tolerance and/or resistance to environmental stress” relates to an increased drought resistance.

[0100] In one embodiment transgenic plants with at least one transgenic modification as compared to a corresponding wild-type plant used in the process of the invention are plants with an increased or generated activities of a polypeptide with an activity as indicated in table B, column 5, line No 1, 5, 7, 10, 11, 12, 16, 19, 20, 21, 23, 25, 27, 28, 30, 31, 33, 37, 39, 40, 42, 43, 91, 105, 107, 112, 150, 159, 164, 165, 166, 167, 168, 169, 170, 171, 172, 173, 174, 175, 176, 177, 178, 182, 186, 187, 188, 189, 190, 194, 196, 203, 204, 205, 206, 207, 209, 210, 211, 213, and/or SEQ ID NO: 1, 2, 3, 4, 5, 6, 7, 8, 9, 10, 11, 12, 13, 14, 15, 16, 17, 18, 19, 20, 21, 22, 23, 24, 25, 26, 27, 28, 29, 30, 31, 32, 46, 53, 266 respectively plants with an increased or generated activities of a polypeptide according to the sequence number as depicted in table B, column 3, line No 1, 5, 7, 10, 11, 12, 16, 19, 20, 21, 23, 25, 27, 28, 30, 31, 33, 37, 39, 40, 42, 43, 91, 105, 107, 112, 150, 159, 164, 165, 166, 167, 168, 169, 170, 171, 172, 173, 174, 175, 176, 177, 178, 182, 186, 187, 188, 189, 190, 194, 196, 203, 204, 205, 206, 207, 209, 210, 211, 213, and/or SEQ ID NO: 1, 2, 3, 4, 5, 6, 7, 8, 9, 10, 11, 12, 13, 14, 15, 16, 17, 18, 19, 20, 21, 22, 23, 24, 25, 26, 27, 28, 29, 30, 31, 32, 46, 53, 266 respectively plants with an increased or generated expression of the gene as depicted in table B, column 1, line No 1, 5, 7, 10, 11, 12, 16, 19, 20, 21, 23, 25, 27, 28, 30, 31, 33, 37, 39, 40, 42, 43, 91, 105, 107, 112, 150, 159, 164, 165, 166, 167, 168, 169, 170, 171, 172, 173, 174, 175, 176, 177, 178, 182, 186, 187, 188, 189, 190, 194, 196, 203, 204, 205, 206, 207, 209, 210, 211, 213 and/or SEQ ID NO: 1, 2, 3, 4, 5, 6, 7, 8, 9, 10, 11, 12, 13, 14, 15, 16, 17, 18, 19, 20, 21, 22, 23, 24, 25, 26, 27, 28, 29, 30, 31, 32, 46, 53, 266.

[0101] In one embodiment transgenic plants with at least one transgenic modification as compared to a corresponding wild-type plant used in the process of the invention are plants with an increased or generated activity of a polypeptide with an activity of a transcription factor, preferably of the subfamily of an “AP2 DOMAIN CONTAINING DEHYDRATION RESPONSIVE ELEMENT BINDING PROTEIN 1”, preferably as depicted in SEQ ID NO: 1 and in table B, line 23, encoded by the gene EST163t.

[0102] In one embodiment the present invention relates to a method for increasing the plant health and plant productivity which comprises

a) treating the locus where the plant with at least one transgenic modification is growing or is expected to grow, and/or the seeds and/or the plant with at least one trans-genic modification from which the transgenic plant grows with an effective amount of a chemical composition comprising at least one active ingredient and
b) cultivating and growing said seed and/or plant under conditions which permit the development of the plant,
and whereby the detection of increased plant health and/or increased plant productivity comprises at least one of the following steps:
i) growing transgenic seedlings and/or plants in a greenhouse under optimal, well water conditions, preferably administrating supplemental nutrients and light,
ii) collecting phenotyic data in an imaging procedure,
iii) harvesting the plants for determining fresh weight, dry weight and/or plant volume and standardize and correlate the data from the imaging procedure with the physiological features,
iv) measuring with the imaging system, preferably scanalyzer, the plant volume, internode length, greenness, yellowness, leaf angle, area of the leaves, number of leaves and/or stem length of the plants
v) comparing the data of chemically treated plants with non treated plants

[0103] In one embodiment transgenic plants with at least one transgenic modification as compared to a corresponding wild-type plant used in the process of the invention are plants with one or more increased or generated activities selected from the group consisting of homologs of the above mentioned polypeptides and/or homologs of the nucleic acid molecules encoding said polypeptides.

[0104] These homologs which are advantageously for the process according to the invention can be isolated based on their homology to the nucleic acid molecules disclosed herein using the sequences or part thereof as hybridization probe and following standard hybridization techniques under stringent hybridization conditions. In this context, it is possible to use, for example, isolated nucleic acid molecules of at least 15, 20, 25, 30, 35, 40, 50, 60 or more nucleotides, preferably of at least 15, 20 or 25 nucleotides in length which hybridize under stringent conditions with the above-described nucleic acid molecules, in particular with those which encompass a nucleotide sequence of the nucleic acid molecule used in the process of the invention or encoding a protein used in the invention or of the nucleic acid molecule of the invention. Nucleic acid molecules with 30, 50, 100, 250 or more nucleotides may also be used.

[0105] The term “homology” means that the respective nucleic acid molecules or encoded proteins are functionally and/or structurally equivalent. The nucleic acid molecules that are homologous to the nucleic acid molecules described above and that are derivatives of said nucleic acid molecules are, for example, variations of said nucleic acid molecules which represent modifications having the same biological function, in particular encoding proteins with the same or substantially the same biological function. They may be naturally occurring variations, such as sequences from other plant varieties or species, or mutations. These mutations may occur naturally or may be obtained by mutagenesis techniques. The allelic variations may be naturally occurring allelic variants as well as synthetically produced or genetically engineered variants. Structurally equivalents can, for example, be identified by testing the binding of said polypeptide to antibodies or computer based predictions. Structurally equivalent to have the similar immunological characteristic, e.g. comprise similar epitopes.

[0106] By “hybridizing” it is meant that such nucleic acid molecules hybridize under conventional hybridization conditions, preferably under stringent conditions such as described by, e.g., Sambrook (Molecular Cloning; A Laboratory Manual, 2nd Edition, Cold Spring Harbor Laboratory Press, Cold Spring Harbor, N.Y. (1989)) or in Current Protocols in Molecular Biology, John Wiley & Sons, N.Y. (1989), 6.3.1-6.3.6.

[0107] Homolog polypeptides are polypeptides which comprises an amino acid sequence at least about 50% identical to an amino acid sequence shown in SEQ ID NO: 1 to 270. Preferably, the protein encoded by the nucleic acid molecule is at least about 60% identical to the sequence shown in SEQ ID NO: 1 to 270, more preferably at least about 70% identical to one of the sequences shown in SEQ ID NO: 1 to 270, even more preferably at least about 80%, 90%, 95% homologous to the sequence shown in SEQ ID NO: 1 to 270, and most preferably at least about 96%, 97%, 98%, or 99% identical to the sequence shown in SEQ ID NO: 1 to 270.

[0108] To determine the percentage homology (=identity, herein used interchangeably) of two amino acid sequences or of two nucleic acid molecules, the sequences are written one underneath the other for an optimal comparison (for example gaps may be inserted into the sequence of a protein or of a nucleic acid in order to generate an optimal alignment with the other protein or the other nucleic acid).

[0109] The amino acid residues or nucleic acid molecules at the corresponding amino acid positions or nucleotide positions are then compared. If a position in one sequence is occupied by the same amino acid residue or the same nucleic acid molecule as the corresponding position in the other sequence, the molecules are homologous at this position (i.e. amino acid or nucleic acid “homology” as used in the present context corresponds to amino acid or nucleic acid “identity”. The percentage homology between the two sequences is a function of the number of identical positions shared by the sequences (i.e. % homology=number of identical positions/total number of positions×100). The terms “homology” and “identity” are thus to be considered as synonyms.

[0110] For the determination of the percentage homology (=identity) of two or more amino acids or of two or more nucleotide sequences several computer software programs have been developed. The homology of two or more sequences can be calculated with for example the software fasta, which presently has been used in the version fasta 3 (W. R. Pearson and D. J. Lipman (1988), Improved Tools for Biological Sequence Comparison.PNAS 85:2444-2448; W. R. Pearson (1990) Rapid and Sensitive Sequence Comparison with FASTP and FASTA, Methods in Enzymology 183:63-98; W. R. Pearson and D. J. Lipman (1988) Improved Tools for Biological Sequence Comparison.PNAS 85:2444-2448; W. R. Pearson (1990); Rapid and Sensitive Sequence Comparison with FASTP and FASTAMethods in Enzymology 183:63-98). Another useful program for the calculation of homologies of different sequences is the standard blast program, which is included in the Biomax pedant software (Biomax, Munich, Federal Republic of Germany). This leads unfortunately sometimes to suboptimal results since blast does not always include complete sequences of the subject and the querry. Nevertheless as this program is very efficient it can be used for the comparison of a huge number of sequences. The following settings are typically used for such a comparisons of sequences:

—p Program Name [String]; —d Database [String]; default=nr; —i Query File [File In]; default=stdin; —e Expectation value (E) [Real]; default=10.0; —m alignment view options: 0=pairwise; 1=query-anchored showing identities; 2=query-anchored no identities; 3=flat query-anchored, show identities; 4=flat query-anchored, no identities; 5=query-anchored no identities and blunt ends; 6=flat query-anchored, no identities and blunt ends; 7=XML Blast output; 8=tabular; 9 tabular with comment lines [Integer]; default=0; —o BLAST report Output File [File Out] Optional; default=stdout; —F Filter query sequence (DUST with blastn, SEG with others) [String]; default=T; —G Cost to open a gap (zero invokes default behavior) [Integer]; default=0; —E Cost to extend a gap (zero invokes default behavior) [Integer]; default=0; —X X dropoff value for gapped alignment (in bits) (zero invokes default behavior); blastn 30, megablast 20, tblastx 0, all others 15 [Integer]; default=0; —I Show GI's in deflines [T/F]; default=F; —q Penalty for a nucleotide mismatch (blastn only) [Integer]; default=−3; —r Reward for a nucleotide match (blastn only) [Integer]; default=1; —v Number of database sequences to show one-line descriptions for (V) [Integer]; default=500; —b Number of database sequence to show alignments for (B) [Integer]; default=250; —f Threshold for extending hits, default if zero; blastp 11, blastn 0, blastx 12, tblastn 13; tblastx 13, megablast 0 [Integer]; default=0; —g Perfom gapped alignment (not available with tblastx) [T/F]; default=T; —Q Query Genetic code to use [Integer]; default=1; —D DB Genetic code (for tblast[nx] only) [Integer]; default=1; —a Number of processors to use [Integer]; default=1; —O SeqAlign file [File Out] Optional; —J Believe the query defline [T/F]; default=F; —M Matrix [String]; default=BLOSUM62; —W Word size, default if zero (blastn 11, megablast 28, all others 3) [Integer]; default=0; —z Effective length of the database (use zero for the real size) [Real]; default=0; —K Number of best hits from a region to keep (off by default, if used a value of 100 is recommended) [Integer]; default=0; —P 0 for multiple hit, 1 for single hit [Integer]; default=0; —Y Effective length of the search space (use zero for the real size) [Real]; default=0; —S Query strands to search against database (for blast[nx], and tblastx); 3 is both, 1 is top, 2 is bottom [Integer]; default=3; —T Produce HTML output [T/F]; default=F; —I Restrict search of database to list of GI's [String] Optional; —U Use lower case filtering of FASTA sequence [T/F] Optional; default=F; —y X dropoff value for ungapped extensions in bits (0.0 invokes default behavior); blastn 20, megablast 10, all others 7 [Real]; default=0.0; —Z X dropoff value for final gapped alignment in bits (0.0 invokes default behavior); blastn/megablast 50, tblastx 0, all others 25 [Integer]; default=0; —R PSI-TBLASTN checkpoint file [File In] Optional; —n MegaBlast search [T/F]; default=F; —L Location on query sequence [String] Optional; —A Multiple Hits window size, default if zero (blastn/megablast 0, all others 40 [Integer]; default=0; —w Frame shift penalty (OOF algorithm for blastx) [Integer]; default=0; —t Length of the largest intron allowed in tblastn for linking HSPs (0 disables linking) [Integer]; default=0.

[0111] Results of high quality are reached by using the algorithm of Needleman and Wunsch or Smith and Waterman. Therefore programs based on said algorithms are preferred. Advantageously the comparisons of sequences can be done with the program PileUp (J. Mol. Evolution., 25, 351-360, 1987, Higgins et al., CABIOS, 5 1989: 151-153) or preferably with the programs Gap and BestFit, which are respectively based on the algorithms of Needleman and Wunsch [J. Mol. Biol. 48; 443-453 (1970)] and Smith and Waterman [Adv. Appl. Math. 2; 482-489 (1981)]. Both programs are part of the GCG software-package [Genetics Computer Group, 575 Science Drive, Madison, Wis., USA 53711 (1991); Altschul et al. (1997) Nucleic Acids Res. 25:3389 et seq.]. Therefore preferably the calculations to determine the percentages of sequence homology are done with the program Gap over the whole range of the sequences. The following standard adjustments for the comparison of nucleic acid sequences were used: gap weight: 50, length weight: 3, average match: 10.000, average mismatch: 0.000.

[0112] Preferred transgenic plants are, for example, selected from the families Aceraceae, Anacardiaceae, Apiaceae, Asteraceae, Brassicaceae, Cactaceae, Cucurbitaceae, Euphorbiaceae, Fabaceae, Malvaceae, Nymphaeaceae, Papaveraceae, Rosaceae, Salicaceae, Solanaceae, Arecaceae, Bromeliaceae, Cyperaceae, Iridaceae, Liliaceae, Orchidaceae, Gentianaceae, Labiaceae, Magnoliaceae, Ranunculaceae, Carifolaceae, Rubiaceae, Scrophulariaceae, Caryophyllaceae, Ericaceae, Polygonaceae, Violaceae, Juncaceae or Poaceae and preferably from a plant selected from the group of the families Apiaceae, Asteraceae, Brassicaceae, Cucurbitaceae, Fabaceae, Papaveraceae, Rosaceae, Solanaceae, Liliaceae or Poaceae. Preferred are crop plants such as plants advantageously selected from the group of the genus peanut, oilseed rape, canola, cotton, sunflower, sugar cane, safflower, olive, sesame, hazelnut, almond, avocado, bay, pumpkin/squash, linseed, soybeans, pistachio, borage, maize, wheat, rye, oats, sorghum and millet, triticale, rice, barley, cassava, potato, sugar beet, egg plant, alfalfa, and perennial grasses and forage plants, oil palm, vegetables (brassicas, root vegetables, tuber vegetables, pod vegetables, fruiting vegetables, onion vegetables, leafy vegetables and stem vegetables), buckwheat, Jerusalem artichoke, broad bean, vetches, lentil, dwarf bean, lupin, clover, potato, tomato, lettuce, onions and Lucerne.

[0113] In one preferred embodiment, the transgenic plant is selected from the families Aceraceae, Anacardiaceae, Apiaceae, Asteraceae, Brassicaceae, Cactaceae, Cucurbitaceae, Euphorbiaceae, Fabaceae, Malvaceae, Nymphaeaceae, Papaveraceae, Rosaceae, Salicaceae, Solanaceae, Arecaceae, Bromeliaceae, Cyperaceae, Iridaceae, Liliaceae, Orchidaceae, Gentianaceae, Labiaceae, Magnoliaceae, Ranunculaceae, Carifolaceae, Rubiaceae, Scrophulariaceae, Caryophyllaceae, Ericaceae, Polygonaceae, Violaceae, Juncaceae or Poaceae and preferably from a plant selected from the group of the families Apiaceae, Asteraceae, Brassicaceae, Cucurbitaceae, Fabaceae, Papaveraceae, Rosaceae, Solanaceae, Liliaceae or Poaceae. Preferred are crop plants and in particular plants mentioned herein above as host plants such as the families and genera mentioned above for example preferred the species Anacardium occidentale, Calendula officinalis, Carthamus tinctorius, Cichorium intybus, Cynara scolymus, Helianthus annus, Tagetes lucida, Tagetes erecta, Tagetes tenuifolia; Daucus carota; Corylus avellana, Corylus colurna, Borago officinalis; Brassica napus, Brassica rapa ssp., Sinapis arvensis Brassica juncea, Brassica juncea var. juncea, Brassica juncea var. crispifolia, Brassica juncea var. foliosa, Brassica nigra, Brassica sinapioides, Melanosinapis communis, Brassica oleracea, Arabidopsis thaliana, Anana comosus, Ananas ananas, Bromelia comosa, Carica papaya, Cannabis sative, Ipomoea batatus, Ipomoea pandurata, Convolvulus batatas, Convolvulus tiliaceus, Ipomoea fastigiata, Ipomoea tiliacea, Ipomoea triloba, Convolvulus panduratus, Beta vulgaris, Beta vulgaris var. altissima, Beta vulgaris var. vulgaris, Beta maritima, Beta vulgaris var. perennis, Beta vulgaris var. conditiva, Beta vulgaris var. esculenta, Cucurbita maxima, Cucurbita mixta, Cucurbita pepo, Cucurbita moschata, Olea europaea, Manihot utilissima, Janipha manihot, Jatropha manihot, Manihot aipil, Manihot dulcis, Manihot manihot, Manihot melanobasis, Manihot esculenta, Ricinus communis, Pisum sativum, Pisum arvense, Pisum humile, Medicago sativa, Medicago falcata, Medicago varia, Glycine max Dolichos soja, Glycine gracilis, Glycine hispida, Phaseolus max, Soja hispida, Soja max, Cocos nucifera, Pelargonium grossularioides, Oleum cocoas, Laurus nobilis, Persea americana, Arachis hypogaea, Linum usitatissimum, Linum humile, Linum austriacum, Linum bienne, Linum angustifolium, Linum catharticum, Linum flavum, Linum grandiflorum, Adenolinum grandiflorum, Linum lewisii, Linum narbonense, Linum perenne, Linum perenne var. lewisii, Linum pratense, Linum trigynum, Punica granatum, Gossypium hirsutum, Gossypium arboreum, Gossypium barbadense, Gossypium herbaceum, Gossypium thurberi, Musa nana, Musa acuminata, Musa paradisiaca, Musa spp., Elaeis guineensis, Papaver orientale, Papaver rhoeas, Papaver dubium, Sesamum indicum, Piper aduncum, Piper amalago, Piper angustifolium, Piper auritum, Piper betel, Piper cubeba, Piper longum, Piper nigrum, Piper retrofractum, Artanthe adunca, Artanthe elongata, Peperomia elongata, Piper elongatum, Steffensia elongata, Hordeum vulgare, Hordeum jubaturn, Hordeum murinum, Hordeum secalinum, Hordeum distichon Hordeum aegiceras, Hordeum hexastichon, Hordeum hexastichum, Hordeum irregulare, Hordeum sativum, Hordeum secalinum, Avena sativa, Avena fatua, Avena byzantina, Avena fatua var. sativa, Avena hybrida, Sorghum bicolor, Sorghum halepense, Sorghum saccharatum, Sorghum vulgare, Andropogon drummondii, Holcus bicolor, Holcus sorghum, Sorghum aethiopicum, Sorghum arundinaceum, Sorghum caffrorum, Sorghum cernuum, Sorghum dochna, Sorghum drummondii, Sorghum durra, Sorghum guineense, Sorghum lanceolatum, Sorghum nervosum, Sorghum saccharatum, Sorghum subglabrescens, Sorghum verticilliflorum, Sorghum vulgare, Holcus halepensis, Sorghum miliaceum millet, Panicum militaceum, Zea mays, Triticum aestivum, Triticum durum, Triticum turgidum, Triticum hybernum, Triticum macha, Triticum sativum or Triticum vulgare, Cofea spp., Coffea arabica, Coffea canephora, Coffea liberica, Capsicum annuum, Capsicum annuum var. glabriusculum, Capsicum frutescens, Capsicum annuum, Nicotiana tabacum, Solanum tuberosum, Solanum melongena, Lycopersicon esculentum, Lycopersicon lycopersicum, Lycopersicon pyriforme, Solanum integrifolium, Solanum lycopersicum Theobroma cacao or Camellia sinensis.

[0114] Anacardiaceae such as the genera Pistacia, Mangifera, Anacardium e.g. the species Pistacia vera [pistachios, Pistazie], Mangifer indica [Mango] or Anacardium occidentale [Cashew]; Asteraceae such as the genera Calendula, Carthamus, Centaurea, Cichorium, Cynara, Helianthus, Lactuca, Locusta, Tagetes, Valeriana e.g. the species Calendula officinalis [Marigold], Carthamus tinctorius [safflower], Centaurea cyanus [cornflower], Cichorium intybus [blue daisy], Cynara scolymus [Artichoke], Helianthus annus [sunflower], Lactuca sativa, Lactuca crispa, Lactuca esculenta, Lactuca scariola L. ssp. sativa, Lactuca scariola L. var. integrata, Lactuca scariola L. var. integrifolia, Lactuca sativa subsp. romana, Locusta communis, Valeriana locusta [lettuce], Tagetes lucida, Tagetes erecta or Tagetes tenuifolia [Marigold]; Apiaceae such as the genera Daucus e.g. the species Daucus carota [carrot]; Betulaceae such as the genera Corylus e.g. the species Corylus avellana or Corylus colurna [hazelnut]; Boraginaceae such as the genera Borago e.g. the species Borago officinalis [borage]; Brassicaceae such as the genera Brassica, Melanosinapis, Sinapis, Arabadopsis e.g. the species Brassica napus, Brassica rapa ssp. [canola, oilseed rape, turnip rape], Sinapis arvensis Brassica juncea, Brassica juncea var. juncea, Brassica juncea var. crispifolia, Brassica juncea var. foliosa, Brassica nigra, Brassica sinapioides, Melanosinapis communis [mustard], Brassica oleracea [fodder beet] or Arabidopsis thaliana; Bromeliaceae such as the genera Anana, Bromelia e.g. the species Anana comosus, Ananas ananas or Bromelia comosa [pineapple]; Caricaceae such as the genera Carica e.g. the species Carica papaya [papaya]; Cannabaceae such as the genera Cannabis e.g. the species Cannabis sative [hemp], Convolvulaceae such as the genera Ipomea, Convolvulus e.g. the species Ipomoea batatus, Ipomoea pandurata, Convolvulus batatas, Convolvulus tiliaceus, Ipomoea fastigiata, Ipomoea tiliacea, Ipomoea triloba or Convolvulus panduratus [sweet potato, Man of the Earth, wild potato], Chenopodiaceae such as the genera Beta, i.e. the species Beta vulgaris, Beta vulgaris var. altissima, Beta vulgaris var. Vulgaris, Beta maritima, Beta vulgaris var. perennis, Beta vulgaris var. conditiva or Beta vulgaris var. esculenta [sugar beet]; Cucurbitaceae such as the genera Cucubita e.g. the species Cucurbita maxima, Cucurbita mixta, Cucurbita pepo or Cucurbita moschata [pumpkin, squash]; Elaeagnaceae such as the genera Elaeagnus e.g. the species Olea europaea [olive]; Ericaceae such as the genera Kalmia e.g. the species Kalmia latifolia, Kalmia angustifolia, Kalmia microphylla, Kalmia polifolia, Kalmia occidentalis, Cistus chamaerhodendros or Kalmia lucida [American laurel, broad-leafed laurel, calico bush, spoon wood, sheep laurel, alpine laurel, bog laurel, western bog-laurel, swamp-laurel]; Euphorbiaceae such as the genera Manihot, Janipha, Jatropha, Ricinus e.g. the species Manihot utilissima, Janipha manihot, Jatropha manihot, Manihot aipil, Manihot dulcis, Manihot manihot, Manihot melanobasis, Manihot esculenta [manihot, arrowroot, tapioca, cassava] or Ricinus communis [castor bean, Castor Oil Bush, Castor Oil Plant, Palma Christi, Wonder Tree]; Fabaceae such as the genera Pisum, Albizia, Cathormion, Feuillea, Inga, Pithecolobium, Acacia, Mimosa, Medicajo, Glycine, Dolichos, Phaseolus, Soja e.g. the species Pisum sativum, Pisum arvense, Pisum humile [pea], Albizia berteriana, Albizia julibrissin, Albizia lebbeck, Acacia berteriana, Acacia littoralis, Albizia berteriana, Albizzia berteriana, Cathormion berteriana, Feuillea berteriana, Inga fragrans, Pithecellobium berterianum, Pithecellobium fragrans, Pithecolobium berterianum, Pseudalbizzia berteriana, Acacia julibrissin, Acacia nemu, Albizia nemu, Feuilleea julibrissin, Mimosa julibrissin, Mimosa speciosa, Sericanrda julibrissin, Acacia lebbeck, Acacia macrophylla, Albizia lebbek, Feuilleea lebbeck, Mimosa lebbeck, Mimosa speciosa [bastard logwood, silk tree, East Indian Walnut], Medicago sativa, Medicago falcata, Medicago varia [alfalfa] Glycine max Dolichos soja, Glycine gracilis, Glycine hispida, Phaseolus max, Soja hispida or Soja max [soybean]; Geraniaceae such as the genera Pelargonium, Cocos, Oleum e.g. the species Cocos nucifera, Pelargonium grossularioides or Oleum cocois [coconut]; Gramineae such as the genera Saccharum e.g. the species Saccharum officinarum; Juglandaceae such as the genera Juglans, Wallia e.g. the species Juglans regia, Juglans ailanthifolia, Juglans sieboldiana, Juglans cinerea, Wallia cinerea, Juglans bixbyi, Juglans californica, Juglans hindsii, Juglans intermedia, Juglans jamaicensis, Juglans major, Juglans microcarpa, Juglans nigra or Wallia nigra [walnut, black walnut, common walnut, persian walnut, white walnut, butternut, black walnut]; Lauraceae such as the genera Persea, Laurus e.g. the species laurel Laurus nobilis [bay, laurel, bay laurel, sweet bay], Persea americana Persea americana, Persea gratissima or Persea persea [avocado]; Leguminosae such as the genera Arachis e.g. the species Arachis hypogaea [peanut]; Linaceae such as the genera Linum, Adenolinum e.g. the species Linum usitatissimum, Linum humile, Linum austriacum, Linum bienne, Linum angustifolium, Linum catharticum, Linum flavum, Linum grandiflorum, Adenolinum grandiflorum, Linum lewisii, Linum narbonense, Linum perenne, Linum perenne var. lewisii, Linum pratense or Linum trigynum [flax, linseed]; Lythrarieae such as the genera Punica e.g. the species Punica granatum [pomegranate]; Malvaceae such as the genera Gossypium e.g. the species Gossypium hirsutum, Gossypium arboreum, Gossypium barbadense, Gossypium herbaceum or Gossypium thurberi [cotton]; Musaceae such as the genera Musa e.g. the species Musa nana, Musa acuminata, Musa paradisiaca, Musa spp. [banana]; Onagraceae such as the genera Camissonia, Oenothera e.g. the species Oenothera biennis or Camissonia brevipes [primrose, evening primrose]; Palmae such as the genera Elacis e.g. the species Elaeis guineensis [oil palm]; Papaveraceae such as the genera Papaver e.g. the species Papaver orientale, Papaver rhoeas, Papaver dubium [poppy, oriental poppy, corn poppy, field poppy, shirley poppies, field poppy, long-headed poppy, long-pod poppy]; Pedaliaceae such as the genera Sesamum e.g. the species Sesamum indicum [sesame]; Piperaceae such as the genera Piper, Artanthe, Peperomia, Steffensia e.g. the species Piper aduncum, Piper amalago, Piper angustifolium, Piper auritum, Piper betel, Piper cubeba, Piper longum, Piper nigrum, Piper retrofractum, Artanthe adunca, Artanthe elongata, Peperomia elongata, Piper elongatum, Steffensia elongata. [Cayenne pepper, wild pepper]; Poaceae such as the genera Hordeum, Secale, Avena, Sorghum, Andropogon, Holcus, Panicum, Oryza, Zea, Triticum e.g. the species Hordeum vulgare, Hordeum jubatum, Hordeum murinum, Hordeum secalinum, Hordeum distichon Hordeum aegiceras, Hordeum hexastichon, Hordeum hexastichum, Hordeum irregulare, Hordeum sativum, Hordeum secalinum [barley, pearl barley, foxtail barley, wall barley, meadow barley], Secale cereale [rye], Avena sativa, Avena fatua, Avena byzantina, Avena fatua var. sativa, Avena hybrida [oat], Sorghum bicolor, Sorghum halepense, Sorghum saccharatum, Sorghum vulgare, Andropogon drummondii, Holcus bicolor, Holcus sorghum, Sorghum aethiopicum, Sorghum arundinaceum, Sorghum caffrorum, Sorghum cernuum, Sorghum dochna, Sorghum drummondii, Sorghum durra, Sorghum guineense, Sorghum lanceolatum, Sorghum nervosum, Sorghum saccharatum, Sorghum subglabrescens, Sorghum verticilliflorum, Sorghum vulgare, Holcus halepensis, Sorghum miliaceum millet, Panicum militaceum [Sorghum, millet], Oryza sativa, Oryza latifolia [rice], Zea mays [corn, maize] Triticum aestivum, Triticum durum, Triticum turgidum, Triticum hybernum, Triticum macha, Triticum sativum or Triticum vulgare [wheat, bread wheat, common wheat], Proteaceae such as the genera Macadamia e.g. the species Macadamia intergrifolia [macadamia]; Rubiaceae such as the genera Coffea e.g. the species Cofea spp., Coffea arabica, Coffea canephora or Coffea liberica [coffee]; Scrophulariaceae such as the genera Verbascum e.g. the species Verbascum blattaria, Verbascum chaixii, Verbascum densiflorum, Verbascum lagurus, Verbascum longifolium, Verbascum lychnitis, Verbascum nigrum, Verbascum olympicum, Verbascum phlomoides, Verbascum phoenicum, Verbascum pulverulentum or Verbascum thapsus [mullein, white moth mullein, nettle-leaved mullein, dense-flowered mullein, silver mullein, long-leaved mullein, white mullein, dark mullein, greek mullein, orange mullein, purple mullein, hoary mullein, great mullein]; Solanaceae such as the genera Capsicum, Nicotiana, Solanum, Lycopersicon e.g. the species Capsicum annuum, Capsicum annuum var. glabriusculum, Capsicum frutescens [pepper], Capsicum annuum [paprika], Nicotiana tabacum, Nicotiana alata, Nicotiana attenuata, Nicotiana glauca, Nicotiana langsdorffii, Nicotiana obtusifolia, Nicotiana quadrivalvis, Nicotiana repanda, Nicotiana rustica, Nicotiana sylvestris [tobacco], Solanum tuberosum [potato], Solanum melongena [egg-plant] (Lycopersicon esculentum, Lycopersicon lycopersicum, Lycopersicon pyriforme, Solanum integrifolium or Solanum lycopersicum [tomato]; Sterculiaceae such as the genera Theobroma e.g. the species Theobroma cacao [cacao]; Theaceae such as the genera Camellia e.g. the species Camellia sinensis) [tea].

[0115] In a further embodiment of the invention the plant with the transgenic modification is derived from a monocotyledonous plant.

[0116] In a further embodiment of the invention the plant with the transgenic modification is derived from a dicotyledonous plant.

[0117] In a further embodiment of the invention the plant with the transgenic modification is derived from a gymnosperm plant, preferably selected from the group of spruce, pine and fir.

[0118] In a further embodiment the process of the invention comprises treating the plant with an effective amount of a chemical composition comprising at least one active ingredient.

[0119] In a further embodiment of the invention the active ingredient (B) is an active compound selected from the group consisting of
[0120] B1) an active compound that inhibits the mitochondrial respiration (breathing) chain at the level of the b/c₁ complex: famoxadone and strobilurins selected from the group consisting of pyraclostrobin, kresoxim-methyl, dimoxystrobin, picoxystrobin, ZJ 0712, trifloxystrobin, enestroburin, orysastrobin, metominostrobin, azoxystrobin, fluoxastrobin, metominostrobin, orysastrobin, pyribencarb, trifloxystrobin, 2-(2-(6-(3-chloro-2-methyl-phenoxy)-5-fluoro-pyrimidin-4-yloxy)-phenyl)-2-methoxyimino-N-methyl-acetamide, 3-methoxy-2-(2-(N-(4-methoxy-phenyl)-cyclopropane-carboximidoylsulfanylmethyl)-phenyl)-acrylic acid methyl ester, methyl (2-chloro-5-[1-(3-methylbenzyloxy-imino)ethyl]benzyl)carbamate and 2-(2-(3-(2,6-dichlorophenyl)-1-methyl-allylideneaminooxymethyl)-phenyl)-2-methoxyimino-N-methyl-
   [0121] preferably famoxadone, pyraclostrobin, kresoxim-methyl, dimoxystrobin, picoxystrobin, ZJ 0712, trifloxystrobin, orysastrobin, azoxystrobin, fluoxastrobin
[0122] B2) carboxylic amides selected from benalaxyl, benodanil, boscalid, carboxin, mepronil, fenfuram, fenhexamid, futolanil, furametpyr, metalaxyl, ofurace, oxadixyl, oxycarboxin, penthiopyrad, thifluzamid, tiadinil, 4-difluoromethyl-2-methyl-thiazol-5-carboxylic acid-(4′-bromo-biphenyl-2-yl)-amide, 4-difluoromethyl-2-methyl-thiazol-5-carboxylic acid-(4′-trifluoromethyl-biphenyl-2-yl)-amide, 4-difluoromethyl-2-methyl-thiazol-5-carboxylic acid-(4′-chloro-3′-fluoro-biphenyl-2-yl)-amide, 3-difluoromethyl-1-methyl-pyrazol-4-carboxylic acid-(3′,4′-dichloro-4-fluoro-biphenyl-2-yl)-amide, 3,4-dichloro-isothiazol-5-carboxylic acid-(2-cyano-phenyl)-amide, dimethomorph, flu-morph, flumetover, fluopicolide (picobenzamid), zoxamide, carpropamide, diclocymet, mandipropamid, N-(2-(4-[3-(4-chloro-phenyl)-prop-2-inyloxy]-3-methoxy-phenyl)-ethyl)-2-methanesulfonylamino-3-methyl-butyramid and N-(2-(4-[3-(4-chloro-phenyl)-prop-2-inyloxy]-3-methoxy-phenyl)-ethyl)-2-ethanesulfonylamino-3-methyl-butyramide;
   [0123] preferably benalaxyl, benodanil, boscalid, carboxin, mepronil, fenfuram, fenhexamid, futolanil, furametpyr, metalaxyl, ofurace, oxadixyl, oxy-carboxin, penthiopyrad, thifluzamid, tiadinil, (picobenzamid), diclocymet
[0124] B3) azoles selected from bitertanole, bromuconazole, cyproconazole, difenoconazole, diniconazole, enilconazole, epoxiconazole, fenbuconazole, flusilazole, fluquinconazole, flutriafol, hexaconazole, imibenconazole, ipconazole, metconazole, myclobutanil, penconazole, propiconazole, prothioconazole, simeconazole, tebuconazole, tetraconazole, triadimenol, triadimefon, triticonazole, cyazofamid, imazalil, pefurazoate, prochloraz, triflumizol, benomyl, carbendazim, fuberidazole, thiabendazole, ethaboxam, etridiazole and hymexazole; paclobutrazol, uniconazole-P;
   [0125] preferably cyproconazole, epoxiconazole, fenbuconazole, fluquinconazole, flutriafol, hexaconazole, ipconazole, metconazole, propiconazole, prothioconazole, ebuconazole, tetraconazole, triadimenol, triadimefon, triticonazole, cyazofamid, imazalil, prochloraz, triflumizol, benomyl, carbendazim, thiabendazole, ethaboxam, hymexazole
[0126] B4) nitrogen-containing heterocyclic compounds selected from fluazinam, pyrifenox, 3-[5-(4-chloro-phenyl)-2,3-dimethyl-isoxazolidin-3-yl]-pyridine, bupirimat, cyprodinil, ferimzon, fenarimol, mepanipyrim, nuarimol, pyrimethanil, triforin, fludioxonil, fenpiclonil, aldimorph, dodemorph, fen-propimorph, tridemorph, iprodion, procymidon, vinclozolin, acibenzolar-S-methyl, anilazin, captan, captafol, dazomet, diclomezine, fenoxanil, folpet, fenpropidin, famoxadone, fenamidone, octhilinon, probenazol, proquinazid, pyroquilon, quinoxyfen, tricyclazol, 2-butoxy-6-iodo-3-propyl-chromen-4-one, 3-(3-bromo-6-fluoro-2-methyl-indole-1-sulfonyl)-[1,2,4]triazole-1-sulfonic acid dimethylamide, ancymidol, flurprimidol, inabenfide, tetcyclacis;
   [0127] preferably pyrimethanil, fludioxonil, fenpiclonil, aldimorph, dodemorph, fen-propimorph, tridemorph, iprodion, procymidon, captan, captafol, dazomet, diclomezine, fenoxanil, probenazol, proquinazid, pyroquilon, quinoxyfen, tricyclazol,
[0128] B5) carbamates and dithiocarbamates selected from ferbam, mancozeb, metiram, metam, propineb, thiram, zineb, ziram, diethofencarb, flubenthiavalicarb, iprovalicarb, propamocarb, 3-(4-chloro-phenyl)-3-(2-isopropoxycarbonylamino-3-methyl-butyrylamino)-propionic acid methylester and N-(1-(1-(4-cyanophenyl)ethanesulfonyl)-but-2-yl) carbamic acid-(4-fluorophenyl)ester;
   [0129] preferably erbam, mancozeb, metiram, metam, propineb, thiram, zineb, ziram, diethofencarb, iprovalicarb, propamocarb,
[0130] B6) guanidines selected from dodin, iminoctadine and guazatin; preferably guazatin
[0131] B7) antibiotics selected from kasugamycin, polyoxine, streptomycin, oxytetracyclin and validamycin A; preferably streptomycin, oxytetracyclin and validamycin A
[0132] B8) fentin salts; preferably fentin salts;
[0133] B9) sulfur-containing heterocyclic compounds selected from isoprothiolan and dithianon;
   [0134] preferably sulfur-containing heterocyclic compounds selected from isoprothiolan and dithianon;
[0135] B10) organophosphorous compounds selected from edifenphos, fosetyl, fosetyl-aluminium, iprobenfos, pyrazophos, tolclofos-methyl, phosphoric acid and the salts thereof;
   [0136] preferably edifenphos, fosetyl, iprobenfos, pyrazopho, phosphoric acid and the salts thereof;
[0137] B11) organo-chloro compounds selected from thiophanate methyl, chlorothalonil, dichlofluanid, tolylfluanid, flusulfamid, phthalide, hexachlorbenzeneii, pencycuron, quintozen;
   [0138] preferably thiophanate methyl, chlorothalonil, dichlofluanid, flusulfamid, phthalide, quintozen;
[0139] B12) nitrophenyl derivatives selected from binapacryl, dinocap and dinobuton;
   [0140] preferably binapacryl, dinocap and dinobuton
[0141] B13) inorganic active ingredients selected from Bordeaux composition, copper acetate, copper hydroxide, copper oxychloride, basic copper sulfate and sulfur;
   [0142] preferably copper acetate, copper hydroxide, copper oxychloride, basic copper sulfate and sulfur;
[0143] B14) spiroxamine;
[0144] B15) cyflufenamide;
[0145] B16) cymoxanil;
[0146] B17) metrafenone;
[0147] B18) organo(thio)phosphates selected from acephate, azamethiphos, azinphosmethyl, chlorpyrifos, chlorpyrifos-methyl, chlorfenvinphos, diazinon, dichlorvos, dicrotophos, dimethoate, disulfoton, ethion, fenitrothion, fenthion, isoxathion, malathion, methamidophos, methidathion, methylparathion, mevinphos, monocrotophos, oxydemeton-methyl, paraoxon, parathion, phenthoate, phosalone, phosmet, phosphamidon, phorate, phoxim, pirimiphos-methyl, profenofos, prothiofos, sulprophos, tetrachlorvinphos, terbufos, triazophos and trichlorfon;
   [0148] preferably metrafenone, chlorpyrifos, chlorpyrifos-methyl, chlorfenvinphos, diazinon, dichlorvos, dimethoate, disulfoton, ethion, methidathion, methyl-parathion, paraoxon, parathion, phenthoate, phosalone, phosmet, phosphamidon, phorate, phoxim, profenofos, prothiofos, sulprophos, tetrachlorvinphos, terbufos, triazophos and trichlorfon;
[0149] B19) carbamates selected from alanycarb, aldicarb, bendiocarb, benfuracarb, carbaryl, carbofuran, carbosulfan, fenoxycarb, furathiocarb, methiocarb, methomyl, oxamyl, pirimicarb, propoxur, thiodicar and triazamate;
   [0150] preferably aldicarb, bendiocarb, benfuracarb, carbaryl, carbofuran, carbosulfan, fenoxycarb, furathiocarb, methiocarb, methomyl, oxamyl, pirimicarb, propoxur, thiodicar and triazamate;
[0151] B20) pyrethroids selected from allethrin, bifenthrin, cyfluthrin, cyhalothrin, cyphenothrin, cypermethrin, alpha-cypermethrin, beta-cypermethrin, zeta-cypermethrin, deltamethrin, esfenvalerate, etofenprox, fenpropathrin, fenvalerate, imiprothrin, lambda-cyhalothrin, permethrin, prallethrin, pyrethrin I and II, resmethrin, silafluofen, tau-fluvalinate, tefluthrin, tetramethrin, tralomethrin, transfluthrin and profluthrin, dimefluthrin;
   [0152] preferably bifenthrin, cyfluthrin, cyphenothrin, cypermethrin, alpha-cypermethrin, beta-cypermethrin, zeta-cypermethrin, deltamethrin, etofenprox, fenpropathrin, fenvalerate, imiprothrin, lambda-cyhalothrin, permethrin, prallethrin, pyrethrin I and II, resmethrin, tefluthrin, tetramethrin, tralomethrin, transfluthrin and profluthrin, dimefluthrin;
[0153] B21) growth regulators selected from a) chitin synthesis inhibitors that are selected from the benzoylureas chlorfluazuron, diflubenzuron, flucycloxuron, flufenoxuron, hexaflumuron, lufenuron, novaluron, teflubenzuron, triflumuron; buprofezin, diofenolan, hexythiazox, etoxazole and clofentazine; b) ecdysone antagonists that are selected from halofenozide, methoxyfenozide, tebufenozide and azadirachtin; c) juvenoids that are selected from pyriproxyfen, methoprene and fenoxycarb and d) lipid biosynthesis inhibitors that are selected from spirodiclofen, spiromesifen and spirotetramat;
   [0154] preferably flufenoxuron, hexaflumuron, teflubenzuron, triflumuron; azadirachtin, methoprene and fenoxycarb, spirodiclofen, spiromesifen and spirotetramat;
[0155] B22) nicotinic receptor agonists/antagonists compounds selected from clothianidin, dinotefuran, imidacloprid, thiamethoxam, nitenpyram, acetamiprid, thiacloprid, AKD1022, bensultap, cartap hydrochloride;
   [0156] preferably clothianidin, dinotefuran, imidacloprid, thiamethoxam, nitenpyram, acetamiprid, thiacloprid, AKD1022B23) GABA antagonist compounds selected from acetoprole, endosulfan, ethiprole, fipronil, vaniliprole, pyrafluprole, pyriprole and the phenylpyrazole compound of formula ¹

[chemical structure]

[0157] preferably acetoprole, endosulfan, ethiprole, fipronil, vaniliprole, pyrafluprole, pyriprole and the phenylpyrazole
[0158] B24) METI I compounds selected from fenazaquin, pyridaben, tebufenpyrad, tolfenpyrad and flufenerim;
   [0159] preferably fenazaquin, pyridaben, tebufenpyrad, tolfenpyrad and flufenerim;
[0160] B25) METI II and III compounds selected from acequinocyl, fluacyprim and hydramethylnon;
   [0161] preferably acequinocyl, fluacyprim and hydramethylnon;
[0162] B26) chlorfenapyr;
[0163] B27) oxidative phosphorylation inhibitor compounds selected from cyhexatin, diafenthiuron, fenbutatin oxide and propargite;
   [0164] preferably diafenthiuron, fenbutatin oxid
[0165] B28) cyromazine;
[0166] B29) piperonyl butoxide
[0167] B30) indoxacarb
[0168] B31) a compound selected from benclothiaz, bifenazate, cartap, flonicamid, pyridalyl, pymetrozine, sulfur, thiocyclam, flubendiamide, cyenopyrafen, flupyrazofos, cyflumetofen, amidoflumet, pyrifluquinazon;
   [0169] preferably benclothiaz, bifenazate, cartap, flonicamid, pyridalyl, pymetrozine, sulfur, thiocyclam, flubendiamide, cyenopyrafen, flupyrazofos, cyflumetofen, amidoflumet
[0170] B.32) Anthranilamides: chloranthraniliprole, the compound of formula ²

[chemical structure]

[0171] B33) Acibenzolar-5-methyl;
[0172] B34) Plant bioregulators: trinexapac-ethyl, prohexadione-calcium, chlormequat chloride, mepiquat chloride, 16,17-dihydro gibberellin A₅, 1-methylcyclopropene, 2,5-norbornadiene, 3-amino-1,2,4-triazole;
   [0173] preferably trinexapac-ethyl, prohexadione-calcium, chlormequat chloride, mepiquat chloride, 1-methylcyclopropene,
[0174] B35) neonicotinoid.

[0175] In a further embodiment of the invention the active ingredient (B) is an active compound that inhibits the mitochondrial respiration (breathing) chain at the level of the b/c₁ complex.

[0176] In a further embodiment of the invention the active ingredient (B) is a strobilurin selected from pyraclostrobin, kresoxim-methyl, dimoxystrobin, 2-(ortho-((2,5-Dimethylphenyl-oxymethylene)phenyl)-3-methoxy-acrylic acid methyl ester, picoxystrobin, trifloxystrobin, enestroburin, orysastrobin, metominostrobin, azoxystrobin and fluoxastrobin.

[0177] In a further embodiment of the invention the active ingredient (B) is selected from (EZ)-3-(2-chloro-1,3-thiazol-5-ylmethyl)-5-methyl-1,3,5-oxadiazinan-4-ylidene(nitro)amine (thiamethoxam), 5-amino-1-(2,6-dichloro-α,α,α-trifluoro-p-tolyl)-4-trifluoromethylsulfinylpyrazole-3-carbonitrile (fipronil) and (EZ)-1-(6-chloro-3-pyridylmethyl)-N-nitroimidazolidin-2-ylideneamine (imidacloprid).

[0178] In a further embodiment of the invention the active ingredient (B) is a plant bioregulator.

[0179] In one embodiment of the invention the plant bioregulator is selected from the group consisting of:
[0180] i) Plant bioregulators of the acylcyclohexanedione-type known to induce defence mechanisms against bacterial and fungal pathogens and against insect pests are: prohexadione and trinexapac, as free acids, esters (C1-C3) or salts (in particular: trinexapac-ethyl and prohexadione-calcium).
[0181] ii) Plant bioregulators known to reduce shoot length and leaf surface and to increase root growth, thereby diminishing the vulnerability of plants to abiotic stress (e.g. lodging as a result of wind and severe rainfall; dehydration as a result of water shortage and high evaporative demand; cell, tissue or whole-plant death as a result of too high or too low temperatures; root anoxia as a result of intense rainfall or flooding) are: (i) Quaternary ammonium compounds, in particular chlormequat and mepiquat as chlorides, borates, sulfates, phosphates or other agriculturally useful salts; (ii) compounds with a nitrogen-containing heterocycle, in particular paclobutrazol, uniconazole-P, metconazole, tebuconazole, ancymidol, flurprimidol, inabenfide, tetcyclacis; (iii) acylcyclohexanediones, in particular prohexadione and trinexapac, as free acids, esters (C1-C3) or salts (in particular: trinexapac-ethyl and prohexadione-calcium) (iiii) derivatives of 16, 17-dihydro gibberellin A₅.
[0182] iii) Plant bioregulators diminishing the responsiveness of plants to abiotic and biotic stresses (thereby avoiding yield-reducing over-reactions), in particular ethylene modulators are:
[0183] ethylene biosynthesis inhibitors which inhibit the conversion of S-adenosyl-L-methionine into 1-aminocyclopropane-1-carboxylic acid (ACC), such as derivatives of vinylglycine, hydroxylamines, oxime ether derivatives;
[0184] ethylene biosynthesis inhibitors which block the conversion of ACC into ethylene, selected from the group consisting of: Co⁺⁺ or Ni⁺⁺ ions in plant-available form; phenolic radical scavengers such as n-propyl gallate; polyamines, such as putrescine, spermine or spermidine; structural analogs of ACC, such as α-aminoisobutyric acid or L-aminocyclopropene-1-carboxylic acid; salicylic acid or acibenzolar-5-methyl; structural analogs of ascorbic acid which act as inhibitors of ACC oxidase, such as prohexadione-Ca or trinexapac-ethyl; and triazolyl compounds such as paclobutrazole or uniconazole as inhibitors of cytochrome P-450-dependent monooxygenases whose main action is to block the metabolism of gibberellins;
[0185] inhibitors of the action of ethylene selected from the group consisting of: structural analogs of ethylene such as 1-methylcyclopropene or 2,5-norbornadiene and 3-amino-1,2,4-triazole or Ag⁺⁺ ions in a weight ratio of I to II of from 20:1 to 0.05:1

[0186] Plant bioregulators can also be involved in endogenous defense mechanisms against biotic (e.g. jasmonic acid and methyl jasmonate) and abiotic stress (e.g. abscisic acid and also its synthetic analogs).

[0187] In a further embodiment of the invention the chemical composition comprises at least one active ingredient (B) and a component (A) which is a glucan or a glucan derivative.

[0188] Component (A) according to the present invention is a glucan or a glucan derivative. “Glucans” are a class of homopolysaccharides which contain glucose units as monomer building blocks, wherein the glucose molecule may be linked by alpha- or beta-glycosidic bonds and may be branched or straight chain. Specific examples for suitable glucans according to the present invention are beta-glucans, more specifically beta-1,3-glucans such as, for example, laminarin and curdlan. Beta-1-3 glucans, for example, have various origins. They can be extracted from bacteria (for example Alcaligenes faecalis which leads to curdlan), fungi, yeasts and from various plants, particularly from algae and cereals.

[0189] “Glucan derivatives” according to the present invention are glucans that are modified, for example by sulfatation or by hydrolysis. Specific examples for suitable glucan derivatives are sulfated glucans, particularly sulfated beta-glucans, more specifically beta-1,3-glucans such as sulfated laminarin or sulfated curdlan. Furthermore, also laminaribiose, cellobiose, nigerose, laminaritriose, laminaritetrose and laminaripentose are suitable glucan derivatives according to the present invention.

[0190] Further derivates of glucans are described in U.S. Pat. No. 6,979,665, Alban S. et al., Synthesis of laminarin sulfates with anticoagulant activity, Arzneim. Forsch. (1992) 42; 1005-1008; U.S. Pat. No. 6,979,665; U.S. Pat. No. 6,387,847; U.S. Pat. No. 6,303,587; U.S. Pat. No. 6,303,587; Black et al., Appl. Chem. (1951), volume 1, pages 505 to 517; U.S. Pat. No. 5,750,472 and references cited therein), U.S. Pat. No. 5,750,472, FR 92 08387; which are included by reference.

[0191] According to one preferred embodiment of the present invention, component (A) is a beta-glucan, in particular a beta-1,3-glucan. Specifically, component (A) is laminarin or curdlan.

[0192] According to another preferred embodiment, component (A) is selected from sulfated glucan, Laminaribiose, Cellobiose, Nigerose, Laminaritriose, Laminaritetrose and Laminaripentose.

[0193] The active compounds of groups B1) to B17) that can be used as the active ingredient (B), their preparation and their action against harmful fungi are generally known; they are commercially available. In most of the cases, they can also be found in The Pesticide Manual, 13^{th} Edition, British Crop Protection Council (2003) among other publications.
[0194] benalaxyl, methyl N-(phenylacetyl)-N-(2,6-xylyl)-DL-alaninate (DE 29 03 612),
[0195] boscalid, 2-chloro-N-(4′-chlorbiphenyl-2-yl)nicotinamide (EP-A 545 099);
[0196] carboxin, 5,6-dihydro-2-methyl-N-phenyl-1,4-oxathiin-3-carboxamide (U.S. Pat. No. 3,249,499),
[0197] mepronil, 3′-isopropoxy-o-toluanilide (U.S. Pat. No. 3,937,840),
[0198] fenhexamid, N-(2,3-dichloro-4-hydroxyphenyl)-1-methylcyclohexanecarboxamide (Proc. Br. Crop Prot. Conf.—Pests Dis., 1998, Vol. 2, p. 327);
[0199] flutolanil, α,α,α-trifluoro-3′-isopropoxy-o-toluanilide (JP 1104514),
[0200] furametpyr, 5-chloro-N-(1,3-dihydro-1,1,3-trimethyl-4-isobenzofuranyl)-1,3-dimethyl-1H-pyrazole-4-carboxamide [CAS RN 123572-88-3],
[0201] metalaxyl, methyl N-(methoxyacetyl)-N-(2,6-xylyl)-DL-alaninate (GB 15 00 581);
[0202] ofurace, (RS)-α-(2-chloro-N-2,6-xylylacetamido)-γ-butyrolactone [CAS RN 58810-48-3];
[0203] oxadixyl; N-(2,6-dimethylphenyl)-2-methoxy-N-(2-oxo-3-oxazolidinyl)acetamide (GB 20 58 059),
[0204] oxycarboxin, 5,6-dihydro-2-methyl-1,4-oxathiin-3-carboxanilide 4,4-dioxide (U.S. Pat. No. 3,399,214),
[0205] penthiopyrad, N-[2-(1,3-dimethylbutyl)-3-thienyl]-1-methyl-3-(trifluoromethyl)-1H-pyrazole-4-carboxamide (JP 10130268),
[0206] thifluzamide, N-[2,6-dibromo-4-(trifluoromethoxy)phenyl]-2-methyl-4-(trifluoromethyl)-5-thiazolecarboxamide;
[0207] tiadinil, 3′-chloro-4,4′-dimethyl-1,2,3-thiadiazole-5-carboxanilide [CAS RN 223580-51-6],
[0208] dimethomorph, 3-(4-chlorophenyl)-3-(3,4-dimethoxyphenyl)-1-morpholin-4-yl-propenone (EP-A 120 321);
[0209] flumorph, 3-(4-fluorophenyl)-3-(3,4-dimethoxyphenyl)-1-morpholin-4-ylpropenone (EP-A 860 438);
[0210] flumetover, 2-(3,4-dimethoxyphenyl)-N-ethyl-α,α,α-trifluoro-N-methyl-p-toluamide [AGROW No. 243, 22 (1995)],
[0211] fluopicolide (picobenzamid), 2,6-dichloro-N-(3-chloro-5-trifluoromethylpyridin-2-ylmethyl)benzamide (WO 99/42447);
[0212] zoxamide, (RS)-3,5-dichloro-N-(3-chloro-1-ethyl-1-methyl-2-oxopropyl)-p-toluamide [CAS RN 156052-68-5];
[0213] carpropamid, 2,2-dichloro-N-[1-(4-chlorophenyl)ethyl]-1-ethyl-3-methylcyclopropane-carboxamide [CAS RN 104030-54-8],
[0214] diclocymet, 2-cyano-N-[(1R)-1-(2,4-dichlorophenyl)ethyl]-3,3-dimethyl butanamide;
[0215] mandipropamid, (RS)-2-(4-chlorophenyl)-N-[3-methoxy-4-(prop-2-ynyloxy)phenethyl]-2-(prop-2-ynyloxy)acetamide [CAS RN 374726-62-2];
[0216] bitertanole, prop-2-′-biphenyl]-4-yloxy)-2-ynyloxy)phenethyl]-2-H-1,2,4-triazole-1-ethanol (DE 23 24 020),
[0217] bromuconazole, 1-[[4-bromo-2-(2,4-dichlorophenyl)tetrahydro-2-furanyl]methyl]-1H-1,2,4-triazole (Proc. 1990 Br. Crop. Prot. Conf.—Pests Dis. Vol. 1, p. 459);
[0218] cyproconazole, 2-(4-chlorophenyl)-3-cyclopropyl-1-[1,2,4]triazol-1-ylbutan-2-ol (U.S. Pat. No. 4,664,696);
[0219] difenoconazole, 1-{2-[2-chloro-4-(4-chlorophenoxy)phenyl]-4-methyl[1,3]dioxolan-2-ylmethyl}-1H[1,2,4]-triazole (GB-A 2 098 607);
[0220] diniconazole, (βE)-β-[(2,4-dichlorophenyl)methylene]-α-(1,1-dimethylethyl)-1H-1,2,4-triazole-1-ethanol (Noyaku Kagaku, 1983, Vol. 8, p. 575);
[0221] enilconazole (imazalil), 1-[2-(2,4-dichlorphenyl)-2-(2-propenyloxy)ethyl]-1H-imidazole (Fruits, 1973, Vol. 28, p. 545);
[0222] epoxiconazole, (2RS,3SR)-1-[3-(2-chlorophenyl)-2,3-epoxy-2-(4-fluorophenyl)propyl]-1H-1,2,4-triazole (EP-A 196 038);
[0223] fenbuconazole, α-[2-(4-chlorophenyl)ethyl]-α-phenyl-1H-1,2,4-triazole-1-propanenitrile (Proc. 1988 Br. Crop Prot. Conf.—Pests Dis. Vol. 1, p. 33);
[0224] flusilazole, 1-{[bis-(4-fluorophenyl)methylsilanyl]methyl}-1H-[1,2,4]triazole (Proc. Br. Crop Prot. Conf.—Pests Dis., 1, 413 (1984));
[0225] fluquinconazole, 3-(2,4-dichlorophenyl)-6-fluoro-2-[1,2,4]-triazol-1-yl-3H-quinazolin-4-one (Proc. Br. Crop Prot. Conf.—Pests Dis., 5-3, 411 (1992));
[0226] flutriafol, α-(2-fluorophenyl)-α-(4-fluorophenyl)-1H-1,2,4-triazole-1-ethanol (EP 15 756);
[0227] hexaconazole, 2-(2,4-dichlorophenyl)-1-[1,2,4]triazol-1-ylhexan-2-ol (CAS RN 79983-71-4);
[0228] imibenconazole, (4-chlorophenyl)methyl N-(2,4-dichlorophenyl)-1H-1,2,4-triazole-1-ethanimidothioate ((Proc. 1988 Br. Crop Prot. Conf.—Pests Dis. Vol. 2, p. 519),
[0229] ipconazole, 2-[(4-chlorophenyl)methyl]-5-(1-methylethyl)-1-(1H-1,2,4-triazol-1-yl-methyl)cyclopentanol (EP 267 778),
[0230] metconazole, 5-(4-chlorobenzyl)-2,2-dimethyl-1-[1,2,4]triazol-1-ylmethylcyclo-pentanol (GB 857 383);
[0231] myclobutanil, 2-(4-chlorophenyl)-2-[1,2,4]triazol-1-ylmethylpentanenitrile (CAS RN 88671-89-0);
[0232] penconazole, 1-[2-(2,4-dichlorophenyl)pentyl]-1H-[1,2,4]triazole (Pesticide Manual, 12th Ed. (2000), p. 712);
[0233] propiconazole, 1-[[2-(2,4-dichlorophenyl)-4-propyl-1,3-dioxolan-2-yl]methyl]-1H-1,2,4-triazole (BE 835 579);
[0234] prothioconazole, 2-[2-(1-chlorocyclopropyl)-3-(2-chlorophenyl)-2-hydroxypropyl]-2,4-dihydro-[1,2,4]triazole-3-thione (WO 96/16048);
[0235] simeconazole, α-(4-fluorophenyl)-α-[(trimethylsilyl)methyl]-1H-1,2,4-triazole-1-ethanol [CAS RN 149508-90-7],
[0236] tebuconazole, 1-(4-chlorophenyl)-4,4-dimethyl-3-[1,2,4]triazol-1-ylmethylpentan-3-ol (EP-A 40 345);
[0237] tetraconazole, 1-[2-(2,4-dichlorophenyl)-3-(1,1,2,2-tetrafluoroethoxy)propyl]-1H-1,2,4-triazole (EP 234 242);
[0238] triadimenol, β-(4-chlorophenoxy)-α-(1,1-dimethylethyl)-1H-1,2,4-triazole-1-ethanol;
[0239] triadimefon, 1-(4-chlorophenoxy)-3,3-dimethyl-1-(1H-1,2,4-triazol-1-yl)-2-butanone;
[0240] triticonazole, (5E)-5-[(4-chlorophenyl)methylene]-2,2-dimethyl-1-(1H-1,2,4-triazol-1-ylmethyl)cyclopentanol (FR 26 41 277);
[0241] cyazofamid, 4-chloro-2-cyano-N,N-dimethyl-5-(4-methylphenyl)-1H-imidazole-1-sulfonamide (CAS RN 120116-88-3],
[0242] pefurazoate, 4-pentenyl 2-[(2-furanylmethyl)(1H-imidazol-1-ylcarbonyl)amino]butanoate [CAS RN 101903-30-4],
[0243] prochloraz, N-{propyl-[2-(2,4,6-trichlorophenoxy)ethyl]}imidazole-1-carboxamide (U.S. Pat. No. 3,991,071);
[0244] triflumizole, (4-chloro-2-trifluoromethylphenyl)-(2-propoxy-1-[1,2,4]triazol-1-ylethylidene)amine (JP-A 79/119 462)
[0245] benomyl, N-butyl-2-acetylaminobenzoimidazol-1-carboxamide (U.S. Pat. No. 3,631,176);
[0246] carbendazim, methyl (1H-benzoimidazol-2-yl)-carbamate (U.S. Pat. No. 3,657,443);
[0247] fuberidazole, 2-(2-furanyl)-1H-benzimidazole (DE 12 09 799),
[0248] thiabendazole, 2-(1,3-thiazol-4-yl)benzimidazole (U.S. Pat. No. 3,017,415),
[0249] ethaboxam, N-(cyano-2-thienylmethyl)-4-ethyl-2-(ethylamino)-5-thiazolcarboxamide (EP-A 639 574),
[0250] etridiazole,
[0251] hymexazole, 5-methyl-1,2-oxazol-3-ol (JP 518249, JP 532202),
[0252] fluazinam, 3-chloro-N-[3-chloro-2,6-dinitro-4-(trifluoromethyl)phenyl]-5-(trifluoromethyl)-2-pyridinamine (The Pesticide Manual, publ. The British Crop Protection Council, 10th ed. (1995), p. 474);
[0253] pyrifenox, 1-(2,4-dichlorophenyl)-2-(3-pyridinyl)ethanone O-methyloxime (EP-A 49 854);
[0254] bupirimate, 5-butyl-2-ethylamino-6-methylpyrimidin-4-yldimethylsulfamate [CAS RN 41483-43-6];
[0255] cyprodinil, (4-cyclopropyl-6-methylpyrimidin-2-yl)phenylamine (EP-A 310 550);
[0256] ferimzone, (Z)-2′-methylacetophenone 4,6-dimethylpyrimidin-2-ylhydrazone [CAS RN 89269-64-7];
[0257] fenarimol, (4-chlorophenyl) (2-chlorophenyl) pyrimidin-5-ylmethanol (GB 12 18 623);
[0258] mepanipyrim, (4-methyl-6-prop-1-ynylpyrimidin-2-yl)phenylamine (EP-A 224 339);
[0259] nuarimol, alpha-(2-chlorophenyl)-alpha-(4-fluorophenyl)-5-pyrimidinemethanol (GB 12 18 623);
[0260] pyrimethanil, 4,6-dimethylpyrimidin-2-ylphenylamine (DD-A 151 404);
[0261] triforine, N,N′-{piperazine-1,4-diylbis[(trichloromethyl)methylene]}diformamide (DE 19 01 421);
[0262] fludioxonil, 4-(2,2-difluorobenzo[1,3]dioxol-4-yl)-1H-pyrrole-3-carbonitrile (The Pesticide Manual, publ. The British Crop Protection Council, 10th ed. (1995), p. 482);
[0263] fenpiclonil, 4-(2,3-dichlorophenyl)-1H-pyrrole-3-carbonitrile (Proc. 1988 Br. Crop Prot. Conf.—Pests Dis., Vol. 1, p. 65);
[0264] aldimorph, 4-alkyl-2,5(or 2,6)-dimethylmorpholine, comprising 65-75% of 2,6-dimethylmorpholine and 25-35% of 2,5-dimethylmorpholine, comprising more than 85% of 4-dodecyl-2,5(or 2,6)-dimethylmorpholine, where “alkyl” may also include octyl, decyl, tetradecyl or hexadecyl and where the cis/trans ratio is 1:1;
[0265] dodemorph, 4-cyclododecyl-2,6-dimethylmorpholine (DE 1198125);
[0266] fenpropimorph, (RS)-cis-4-[3-(4-tert-butylphenyl)-2-methylpropyl]-2,6-dimethyl-morpholine (DE 27 52 096);
[0267] tridemorph, 2,6-dimethyl-4-tridecylmorpholine (DE 11 64 152);
[0268] iprodione, N-isopropyl-3-(3,5-dichlorophenyl)-2,4-dioxoimidazolidine-1-carboxamide (GB 13 12 536);
[0269] procymidone, N-(3,5-dichlorophenyl)-1,2-dimethylcyclopropane-1,2-dicarboximide (U.S. Pat. No. 3,903,090);
[0270] vinclozolin, 3-(3,5-dichlorophenyl)-5-methyl-5-vinyloxazolidine-2,4-dione (DE-OS 22 07 576);
[0271] acibenzolar-S-methyl, methyl benzo[1,2,3]thiadiazole-7-carbothionate;
[0272] anilazine, 4,6-dichloro-N-(2-chlorophenyl)-1,3,5-triazine-2-amine (U.S. Pat. No. 2,720,480);
[0273] captan, 2-trichloromethylsulfanyl-3a,4,7,7a-tetrahydroisoindole-1,3-dione (U.S. Pat. No. 2,553,770);
[0274] captafol, N-(1,1,2,2-tetrachloroethylthio)cyclohex-4-ene-1,2-dicarboximide (Phytopathology 52, S. 754 (1962));
[0275] dazomet, 3,5-dimethyl-1,3,5-thiadiazinane-2-thione (Bull. Soc. Chim. Fr. Vol. 15, p. 891 (1897));
[0276] diclomezine, 6-(3,5-dichlorophenyl)-p-tolyl)pyridazin-3(2H)-one (U.S. Pat. No. 4,052,395);
[0277] fenoxanil, N-(1-cyano-1,2-dimethylpropyl)-2-(2,4-dichlorophenoxy) propanamide (EP-A 262 393);
[0278] folpet, 2-trichloromethylsulfanylisoindole-1,3-dione (U.S. Pat. No. 2,553,770);
[0279] fenpropidin, (RS)-1-[3-(4-tert-butylphenyl)-2-methylpropyl]piperidine (DE 27 52 096);
[0280] famoxadone, (RS)-3-anilino-5-methyl-5-(4-phenoxyphenyl)-1,3-oxazolidine-2,4-dione [CAS RN 131807-57-3];
[0281] fenamidone, (S)-1-anilino-4-methyl-2-methylthio-4-phenylimidazolin-5-one [CAS RN 161326-34-7];
[0282] octhilinone,
[0283] probenazole, 3-allyloxy-1,2-benzothiazole 1,1-dioxide;
[0284] proquinazid, 6-iodo-2-propoxy-3-propylquinazolin-4(3H)-one (WO 97/48684);
[0285] pyroquilon, 1,2,5,6-tetrahydropyrrolo[3,2,1-ij]quinolin-4-on (GB 139 43 373)
[0286] quinoxyfen, 5,7-dichloro-4-(4-fluorophenoxy)quinoline (U.S. Pat. No. 5,240,940);
[0287] tricyclazole, 5-methyl-1,2,4-triazolo[3,4-b]benzothiazole (GB 14 19 121);
[0288] ferbam, iron(3+) dimethyldithiocarbamate (U.S. Pat. No. 1,972,961);
[0289] mancozeb, manganese ethylenebis(dithiocarbanate) zinc complex (U.S. Pat. No. 3,379,610);
[0290] maneb, manganese ethylenebis(dithiocarbamate) (U.S. Pat. No. 2,504,404);
[0291] metiram, zinc ammoniate ethylenebis(dithiocarbamate) (U.S. Pat. No. 3,248,400);
[0292] metam, methyldithiocarbaminic acid (U.S. Pat. No. 2,791,605);
[0293] propineb, zinc propylenebis(dithiocarbamate) polymer (BE 611 960);
[0294] thiram, bis(dimethylthiocarbamoyl) disulfide (DE 642 532);
[0295] zineb, zinc ethylenebis(dithiocarbamate) (U.S. Pat. No. 2,457,674);
[0296] ziram, dimethyldithiocarbamate [CAS RN 137-30-4];
[0297] diethofencarb, isopropyl 3,4-diethoxycarbanilate (EP-A 78 663);
[0298] flubenthiavalicarb (benthiavalicarb), isopropyl {(S)-1-[(1R)-1-(6-fluorobenzothiazol-2-yl)ethylcarbamoyl]-2-methylpropyl}carbamate (JP-A 09/323,984);
[0299] iprovalicarb, isopropyl [(1S)-2-methyl-1-(1-p-tolylethylcarbamoyl)propyl]carbamate (EP-A 472 996);
[0300] propamocarb, propyl 3-(dimethylamino)propylcarbamate (DE 16 43 040);
[0301] dodine, (2,4-dichlorophenoxy)acetic acid (U.S. Pat. No. 2,867,562);
[0302] iminoctadine, bis(8-guanidinooctyl)amine (GB 11 14 155);
[0303] guazatine, mixture of products from the amidation of iminodi(octamethylene)diamine, mainly iminoctadine [CAS RN 108173-90-6];
[0304] kasugamycin, 1L-1,3,4/2,5,6-1-deoxy-2,3,4,5,6-pentahydroxycyclohexyl 2-amino-2,3,4,6-tetradeoxy-4-(alpha-iminoglycino)-alpha-D-arabino-hexopyranoside [CAS RN 6980-18-3];
[0305] polyoxine, 5-(2-amino-5-O-carbamoyl-2-deoxy-L-xylonamido)-1-(5-carboxy-1,2,3,4-tetrahydro-2,4-dioxopyrimidin-1-yl)-1,5-dideoxy-beta-D-allofuranuronic acid and the salts thereof [CAS RN 22976-86-9];
[0306] streptomycin, O-2-deoxy-2-methylamino-alpha-L-glucopyranosyl-(1→2)-O-5-deoxy-3-C-formyl-alpha-L-lyxofuranosyl-(1→4)N¹,N³-diamidino-D-streptamine (J. Am. Chem. Soc. 69, S.1234 (1947));
[0307] validamycin A,-fentin acetate, triphenyltin acetate (U.S. Pat. No. 3,499,086);
[0308] isoprothiolan, diisopropyl 1,3-dithiolan-2-ylidenemalonat (Proc. Insectic. Fungic. Conf. 8. Bd. 2, S. 715 (1975));
[0309] dithianon, 5,10-Dioxo-5,10-dihydronaphtho[2,3-b][1,4]dithiin-2,3-dicarbonitril (GB 857 383);
[0310] edifenphos, O-ethyl S,S-diphenyl phosphorodithioate (DE-A 14 93 736);
[0311] fosetyl, fosetyl-aluminum, (aluminum) ethylphosphonate (FR 22 54 276);
[0312] iprobenfos, S-benzyl O,O-diisopropyl phosphorothioate (Jpn. Pesticide Inf., No. 2, S. 11 (1970));
[0313] pyrazophos, ethyl 2-diethoxyphosphinothioyloxy-5-methylpyrazolo[1,5-a]pyrimidine-6-carboxylate (DE 15 45 790);
[0314] tolclofos-methyl, O-2,6-dichloro-p-tolyl O,O-dimethyl phosphorothioate (GB 14 67 561);
[0315] thiophanate-methyl, 1,2-phenylenebis(iminocarbonothioyl)bis(dimethylcarbamate) (DE-OS 19 30 540);
[0316] chlorothalonil, 2,4,5,6-tetrachloroisophthalonitrile (U.S. Pat. No. 3,290,353);
[0317] dichlofluanid, N-dichlorofluoromethylthio-N′,N′-dimethyl-N-phenylsulfamide (DE 11 93 498);
[0318] tolylfluanid, N-dichlorofluoromethylthio-N′,N′-dimethyl-N-p-tolylsulfamide (DE 11 93 498);
[0319] flusulfamide, 2′,4-dichloro-α,α,α-trifluoro-4′-nitro-m-toluenesulfanilide (EP-A 199 433);
[0320] phthalide (DE 16 43 347);
[0321] hexachlorobenzene (C. R. Seances Acad. Agric. Fr., Vol. 31, p. 24 (1945));
[0322] pencycuron, 1-(4-chlorobenzyl)-1-cyclopentyl-3-phenylurea (DE 27 32 257);
[0323] quintozene, pentachloronitrobenzene (DE 682 048);
[0324] binapacryl, (RS)-2-sec-Butyl-4,6-dinitrophenyl 3-methylcrotonat [CAS RN 485-31-4];
[0325] dinocap, mixture of 2,6-dinitro-4-octylphenylcrotonate and 2,4-dinitro-6-octyl-phenylcrotonate, wherein “octyl” is a mixture of 1-methylheptyl, 1-ethylhexyl and 1-propylpentyl (U.S. Pat. No. 2,526,660);
[0326] dinobuton, (RS)-2-sec-Butyl-4,6-dinitrophenyl isopropyl carbonat [CAS RN 973-21-7];
[0327] Bordeaux composition, mixture of CuSO₄×3Cu(OH)₂×3CaSO₄ [CAS RN 8011-63-0]
[0328] copper acetate, Cu(OCOCH₃)₂ [CAS RN 8011-63-0];
[0329] copper oxychloride, Cu₂Cl(OH)₃ [CAS RN 1332-40-7];
[0330] basic copper sulfate, CuSO₄ [CAS RN 1344-73-6];
[0331] spiroxamine, (8-tert-butyl-1,4-dioxaspiro[4.5]dec-2-yl)diethylamine (EP-A 281 842).
[0332] cyflufenamid, (Z)-N-[α-(cyclopropylmethoxyimino)-2,3-difluoro-6-(trifluoromethyl)benzyl]-2-phenylacetamide (WO 96/19442);
[0333] cymoxanil, 1-(2-cyano-2-methoxyiminoacetyl)-3-ethylurea (U.S. Pat. No. 3,957,847);
[0334] metrafenone, 3′-bromo-2,3,4,6′-tetramethoxy-2′,6-dimethylbenzophenone (U.S. Pat. No. 5,945,567);

[0335] The compounds are named according to IUPAC, their preparation and their fungicidal actions are likewise known:
[0336] N-(4′-bromobiphenyl-2-yl)-4-difluoromethyl-2-methylthiazole-5-carboxamide, N-(4′-trifluoromethylbiphenyl-2-yl)-4-difluoromethyl-2-methylthiazole-5-carboxamide, N-(4′-chloro-3′-fluorobiphenyl-2-yl)-4-difluoromethyl-2-methylthiazole-5-carboxamide, N-(3′,4′-dichloro-4-fluorobiphenyl-2-yl)-3-difluoromethyl-1-methylpyrazole-4-carboxamide (WO 03/066609),
[0337] 3,4-dichloro-isothiazol-5-carboxylic acid (2-cyanophenyl) amide (WO 99/24413);
[0338] N-(2-(4-[3-(4-Chlor-phenyl)-prop-2-ynyloxy]-3-methoxy-phenyl)-ethyl)-2-methan-sulfonylamino-3-methyl-butyramid, N-(2-(4-[3-(4-Chlor-phenyl)-prop-2-ynyloxy]-3-methoxy-phenyl)-ethyl)-2-ethanesulfonylamino-3-methyl-butyramid (WO 04/49804);
[0339] 3-[5-(4-chlorophenyl)-2,3-dimethylisoxazolidin-3-yl]pyridine (EP-A 10 35 122);
[0340] 2-butoxy-6-iodo-3-propylchromen-4-one (WO 03/14103),
[0341] methyl 3-(4-chlorophenyl)-3-(2-isopropoxycarbonylamino-3-methylbutyrylamino)-propanoate (EP-A 1028125)

[0342] Furthermore, the commercially available compounds of groups B18) to B32) of the active ingredient (B) may be found in The Pesticide Manual, 13^{th} Edition, British Crop Protection Council (2003) among other publications.

[0343] Thiamides of formula ┌ (gamma)¹ and their preparation have been described in WO199828279.

[0344] Lepimection is known from Agro Project, PJB Publications Ltd, November 2004. Benclothiaz and its preparation have been described in EP-A1 454621. Methidathion and Paraoxon and their preparation have been described in Farm Chemicals Handbook, Volume 88, Meister Publishing Company, 2001. Acetoprole and its preparation have been described in WO199828277. Flupyrazofos has been described in Pesticide Science 54, 1988, p. 237-243 and in U.S. Pat. No. 4,822,779. Pyrafluprole and its preparation have been described in JP 2002193709 and in WO200100614. Pyriprole and its preparation have been described in WO199845274 and in U.S. Pat. No. 6,335,357. Amidoflumet and its preparation have been described in U.S. Pat. No. 6,221,890 and in JP 21010907. Flufenerim and its preparation have been described in WO2003007717 and in WO2003007718. Cyflumetofen and its preparation have been described in WO2004080180. Anthranilamides of formula ┌ (gamma)⁵ and their preparation have been described in WO200170671; WO200248137; WO200324222, WO200315518, WO200467528; WO200433468; and WO2005118552.

[0345] According to one embodiment of the invention, the active ingredient (B) is an active compound that inhibits the mitochondrial breathing chain at the level of the b/c₁ complex.

[0346] Active compounds that inhibit the mitochondrial breathing chain at the level of the b/c₁ complex are known as fungicides from the literature [see for example Dechema-Monographien Bd. 129, 27-38, VCH Verlagsgemeinschaft Weinheim 1993; Natural Product Reports 1993, 565-574; Biochem. Soc. Trans. 22, 63S (1993)].

[0347] A particularly important class of active compounds that inhibit the mitochondrial breathing chain at the level of the b/c₁ complex are strobilurins. Strobilurins are generally known as fungicides since a long time and have, in some cases, also been described as insecticides (EPA 178 826; EP-A 253 213; WO 93/15046; WO 95/18789; WO 95/21153; WO 95/21154; WO 95/24396; WO 96/01256; WO 97/15552; WO 97/27189). A further example of an active compound that inhibits the mitochondrial breathing chain at the level of the b/c₁ complex is famoxadone (5-methyl-5-(4-phenoxyphenyl)-3-(phenylamino)-2,4-oxazolidinedione).

[0348] In a further preferred embodiment of the present invention, strobilurins are used as the active ingredient (B). According to the present invention, strobilurins which have proven particularly suitable are selected from
[0349] 1) compounds of formula I

[chemical structure]

[0350] in which
[0351] X is halogen, C₁-C₄-alkyl or trifluoromethyl;
   [0352] m is 0 or 1;
   [0353] Q is C(═CH—CH₃)—COOCH₃, C(═CH—OCH₃)—COOCH₃, C(═N—OCH₃)—CONHCH₃, C(═N—OCH₃)—COOCH₃, N(—OCH₃)—COOCH₃, or a group Q1

[chemical structure]

[0354] wherein # denotes the bond to the phenyl ring;
[0355] A is —O—B, —CH₂O—B, —OCH₂—B, —CH₂S—B, —CH═CH—B, —C≡C—B, —CH₂O—N═C(R¹)—B, —CH₂S—N═C(R¹)—B, —CH₂O—N═C(R¹)—CH═CH—B, or —CH₂O—N═C(R¹)—C(R²)═N—OR³, where
[0356] B is phenyl, naphthyl, 5-membered or 6-membered heteroaryl or 5-membered or 6-membered heterocyclyl, containing one, two or three N atoms and/or one O or S atom or one or two O and/or S atoms, the ring systems being unsubstituted or substituted by one, two or three radicals R^{a}:
   [0357] R^{a} is independently cyano, nitro, amino, aminocarbonyl, aminothiocarbonyl, halogen, C₁-C₆-alkyl, C₁-C₆-haloalkyl, C₁-C₆-alkylcarbonyl, C₁-C₆-alkyl-sulfonyl, C₁-C₆-alkylsulfinyl, C₃-C₆-cycloalkyl, C₁-C₆-alkoxy, C₁-C₆-halo-alkoxy, C₁-C₆-alkyloxycarbonyl, C₁-C₆-alkylthio, C₁-C₆-alkylamino, di-C₁-C₆-alkylamino, C₁-C₆-alkylaminocarbonyl, di-C₁-C₆-alkylaminocarbonyl, C₁-C₆-alkylaminothiocarbonyl, di-C₁-C₆-alkylaminothiocarbonyl, C₂-C₆-alkenyl, C₂-C₆-alkenyloxy, phenyl, phenoxy, benzyl, benzyloxy, 5- or 6-membered heterocyclyl, 5- or 6-membered heteroaryl, 5- or 6-membered heteroaryloxy, C(═NOR^{a})—R^{b} or OC(R^{a})₂—C(R^{b})═NOR^{b}, the cyclic radicals, in turn, being unsubstituted or substituted by one, two or three radicals R^{b}:
      [0358] R^{b} is independently cyano, nitro, halogen, amino, aminocarbonyl, aminothiocarbonyl, C₁-C₆-alkyl, C₁-C₆-haloalkyl, C₁-C₆-alkylsulfonyl, C₁-C₆-alkylsulfinyl, C₃-C₆-cycloalkyl, C₁-C₆-alkoxy, C₁-C₆-haloalkoxy, C₁-C₆-alkoxycarbonyl, C₁-C₆-alkylthio, C₁-C₆-alkylamino, di-C₁-C₆-alkylamino, C₁-C₆-alkylaminocarbonyl, di-C₁-C₆-alkylaminocarbonyl, C₁-C₆-alkylaminothiocarbonyl, di-C₁-C₆-alkyl-aminothiocarbonyl, C₂-C₆-alkenyl, C₂-C₆-alkenyloxy, C₃-C₆-cycloalkyl, C₃-C₆-cycloalkenyl, phenyl, phenoxy, phenylthio, benzyl, benzyloxy, 5- or 6-membered heterocyclyl, 5- or 6-membered heteroaryl, 5- or 6-membered heteroaryloxy or C(═NOR^{A})—R^{B},
      [0359] R^{A}, R^{B} are independently hydrogen or C₁-C₆-alkyl;
[0360] R¹ is hydrogen, cyano, C₁-C₄-alkyl, C₁-C₄-haloalkyl, C₃-C₆-cycloalkyl, C₁-C₄-alkoxy, or C₁-C₄-alkylthio;
[0361] R² is phenyl, phenylcarbonyl, phenylsulfonyl, 5- or 6-membered heteroaryl, 5- or 6-membered heteroarylcarbonyl or 5- or 6-membered heteroarylsulfonyl, the ring systems being unsubstituted or substituted by one, two or three radicals R^{a},
   [0362] C₁-C₁₀-alkyl, C₃-C₆-cycloalkyl, C₂-C₁₀-alkenyl, C₂-C₁₀-alkynyl, C₁-C₁₀-alkylcarbonyl, C₂-C₁₀-alkenylcarbonyl, C₃-C₁₀-alkynylcarbonyl, alkylsulfonyl, or C(═NOR^{a})—R^{b}, the hydrocarbon radicals of these groups being unsubstituted or substituted by one, two or three radicals R^{c}:
      [0363] R^{c} is independently cyano, nitro, amino, aminocarbonyl, aminothio-carbonyl, halogen, C₁-C₆-alkyl, C₁-C₆-haloalkyl, C₁-C₆-alkylsulfonyl, C₁-C₆-alkylsulfinyl, C₁-C₆-alkoxy, C₁-C₆-haloalkoxy, C₁-C₆-alkoxy-carbonyl, C₁-C₆-alkylthio, C₁-C₆-alkylamino, di-C₁-C₆-alkylamino, C₁-C₆-alkylaminocarbonyl, di-C₁-C₆-alkylaminocarbonyl, C₁-C₆-alkyl-aminothiocarbonyl, di-C₁-C₆-alkylaminothiocarbonyl, C₂-C₆-alkenyl, C₂-C₆-alkenyloxy,
      [0364] C₃-C₆-cycloalkyl, C₃-C₆-cycloalkyloxy, 5- or 6-membered heterocyclyl, 5- or 6-membered heterocyclyloxy, benzyl, benzyloxy, phenyl, phenoxy, phenylthio, 5- or 6-membered heteroaryl, 5- or 6-membered heteroaryloxy and heteroarylthio, it being possible for the cyclic groups, in turn, to be partially or fully halogenated or to have attached to them one, two or three radicals R^{a}; and
[0365] R³ is hydrogen, C₁-C₆-alkyl, C₂-C₆-alkenyl, C₂-C₆-alkynyl, the hydrocarbon radicals of these groups being unsubstituted or substituted by one, two or three radicals R^{c}; and
[0366] 2) the strobilurins (2-chloro-5-[1-(3-methyl-benzyloxyimino)-ethyl]benzyl)-carbamic acid methyl ester, (2-chloro-5-[1-(6-methyl-pyridine-2-ylmethoxyimino)-ethyl]benzyl)-carbamic acid methyl ester and 2-(ortho-((2,5-dimethyl phenyl-oxymethylene)phenyl)-3-methoxy-acrylic acid methyl ester.

[0367] Compounds of formula I are generally known as fungicides since a long time (see references above).

[0368] The publications cited above describe synthesis routes for the preparation of strobilurins used in the method according to the invention, the disclosure of which is hereby incorporated.

[0369] Especially preferred according to the invention are strobilurins with the following meanings of the substituents, in each case alone or in combination, the disclosure of the publications cited being hereby incorporated.

[0370] In one preferred embodiment of the present invention, preferred strobilurins of formula I wherein Q is N(—OCH₃)—COOCH₃ are the compounds described in the publications WO 93/15046 and WO 96/01256.

[0371] In another preferred embodiment of the present invention, preferred strobilurins of formula I, wherein Q is C(═CH—OCH₃)—COOCH₃ are the compounds described in the publications EP-A 178 826 and EP-A 278 595.

[0372] In another preferred embodiment of the present invention, preferred strobilurins of formula I, wherein Q is C(═N—OCH₃)—COOCH₃ are the compounds described in the publications EP-A 253 213 and EP-A 254 426.

[0373] In another preferred embodiment of the present invention, preferred strobilurins of formula I, wherein Q is C(═N—OCH₃)—CONHCH₃ are the compounds described in the publications EP-A 398 692, EP-A 477 631 and EP-A 628 540.

[0374] In another preferred embodiment of the present invention, preferred strobilurins of formula I, wherein Q is C(═CH—CH₃)—COOCH₃ are the compounds described in the publications EP-A 280 185 and EP-A 350 691.

[0375] In another preferred embodiment of the present invention, preferred strobilurins of formula I, wherein Q is —CH₂O—N═C(R¹)—B are the compounds described in the publications EP-A 460 575 and EP-A 463 488.

[0376] In another preferred embodiment of the present invention, preferred strobilurins of formula I, wherein A is —O—B are the compounds described in the publications EP-A 382 375 and EP-A 398 692.

[0377] In another preferred embodiment of the present invention, preferred strobilurins of formula I, wherein A is —CH₂O—N═C(R¹)—C(R²)═N—OR³ are the compounds described in the publications WO 95/18789, WO 95/21153, WO 95/21154, WO 97/05103 and WO 97/06133.

[0378] Especially preferred are the strobilurins of the formula I in which

### Q is N(—OCH₃)—COOCH₃,

### A is CH₂—O— and

[0379] B is 3-pyrazolyl or 1,2,4-triazolyl, where B has attached to it one or two substituents selected from the group of
[0380] halogen, methyl and trifluoromethyl and
[0381] phenyl and pyridyl, in particular 2-pyridyl, substituted by 1 to 3 radicals R^{b}.

[0382] These active ingredients are described by formula II,

[chemical structure]

in which T is a carbon or a nitrogen atom, R^{a′} is independently selected from halogen, methyl and trifluoromethyl, y is zero, 1 or 2, R^{b} is as defined for formula I, x is zero, 1, 2, 3 or 4.

[0383] More preferred active ingredients are those of formula II′:

[chemical structure]

in which R^{b} is as defined for formula I.

[0384] According to another embodiment of the present invention, the active ingredient (B) is a carboxylic amide selected from the group B2).

[0385] According to another embodiment of the present invention, the active ingredient (B) is an azole selected from the group B3).

[0386] According to another embodiment of the present invention, the active ingredient (B) is a nitrogen-containing heterocyclic compound selected from the group B4).

[0387] According to another embodiment of the present invention, the active ingredient (B) is a carbamate or thiocarbamate selected from the group B5).

[0388] According to another embodiment of the present invention, the active ingredient (B) is a guanidine selected from the group B6).

[0389] According to another embodiment of the present invention, the active ingredient (B) is an antibiotic selected from the group B7).

[0390] According to another embodiment of the present invention, the active ingredient (B) is a fentin salt.

[0391] According to another embodiment of the present invention, the active ingredient (B) is isoprothiolan or dithianon.

[0392] According to another embodiment of the present invention, the active ingredient (B) is an organophosphorous compound selected from the group B10).

[0393] According to another embodiment of the present invention, the active ingredient (B) is an organo-chloro compound selected from the group B11).

[0394] According to another embodiment of the present invention, the active ingredient (B) is a nitrophenyl derivative selected from the group B12).

[0395] According to another embodiment of the present invention, the active ingredient (B) is an inorganic ingredient selected from the group B13).

[0396] According to another embodiment of the present invention, the active ingredient (B) is spiroxamine.

[0397] According to another embodiment of the present invention, the active ingredient (B) is cyflufenamide.

[0398] According to another embodiment of the present invention, the active ingredient (B) is cymoxanil.

[0399] According to another embodiment of the present invention, the active ingredient (B) is metrafenone.

[0400] According to still another preferred embodiment of the present invention, the active ingredient (B) is (EZ)-3-(2-chloro-1,3-thiazol-5-ylmethyl)-5-methyl-1,3,5-oxadiazinan-4-ylidene(nitro)amine (thiamethoxam).

[0401] According to still another preferred embodiment of the present invention, the active ingredient (B) is 5-amino-1-(2,6-dichloro-α,α,α-trifluoro-p-tolyl)-4-trifluoromethylsulfinylpyrazole-3-carbonitrile (fipronil).

[0402] According to still another preferred embodiment of the present invention, the active ingredient (B) is (EZ)-1-(6-chloro-3-pyridylmethyl)-N-nitroimidazolidin-2-ylideneamine (imidacloprit).

[0403] According to still another preferred embodiment of the present invention, the active ingredient (B) is selected from the group consisting of:
[0404] Fungicide:
[0405] Anilide, preferably Isopyrazam, N-(2-bicyclopropyl-2-yl-phenyl)-3-difluoromethyl-1-methyl-1H-pyrazole-4-carboxylic, acid amide
[0406] N-(trans-2-bicyclopropyl-2-yl-phenyl)-3-difluoromethyl-1-methyl-1H-pyrazole-4-carboxylic acid amide
[0407] N-(cis-2-bicyclopropyl-2-yl-phenyl)-3-difluoromethyl-1-methyl-1H-pyrazole-4-carboxylic acid amide
[0408] N-(2-(1,3-dimethyl-butyl)-phenyl)-1,3-dimethyl-5-fluoro-1H-pyrazole-4-carboxylic acid amide
[0409] 3-Difluoromethyl-1-methyl-1H-pyrazole-4-carboxylic acid (2′,4′-difluorobiphenyl-2-yl)-amide
[0410] 3-Difluoromethyl-1-methyl-1H-pyrazole-4-carboxylic acid (2′,4′-dichlorobiphenyl-2-yl)-amide
[0411] 3-Difluoromethyl-1-methyl-1H-pyrazole-4-carboxylic acid (3′,4′-difluorobiphenyl-2-yl)-amide
[0412] 3-Difluoromethyl-1-methyl-1H-pyrazole-4-carboxylic acid (3′,4′-dichlorobiphenyl-2-yl)-amide
[0413] 3-Difluoromethyl-1-methyl-1H-pyrazole-4-carboxylic acid (3′,5′-difluorobiphenyl-2-yl)-amide
[0414] 3-Difluoromethyl-1-methyl-1H-pyrazole-4-carboxylic acid (3′,5′-dichlorobiphenyl-2-yl)-amide
[0415] 3-Difluoromethyl-1-methyl-1H-pyrazole-4-carboxylic acid (3′,4′,5′-trifluorobiphenyl-2-yl)-amide
[0416] Fluopyram, 5-Amino-2-isopropyl-3-oxo-4-ortho-tolyl-2,3-dihydro-pyrazole-1-carbothioic acid S-allyl ester
[0417] N′-(4-(4-chloro-3-trifluoromethyl-phenoxy)-2,5-dimethyl-phenyl)-N-ethyl-N-methyl formamidine
[0418] N′-(4-(4-fluoro-3-trifluoromethyl-phenoxy)-2,5-dimethyl-phenyl)-N-ethyl-N-methyl formamidine
[0419] N′-(2-methyl-5-trifluormethyl-4-(3-trimethylsilanyl-propoxy)-phenyl)-N-ethyl-N-methyl formamidine
[0420] N′-(5-difluormethyl-2-methyl-4-(3-trimethylsilanyl-propoxy)-phenyl)-N-ethyl-N-methyl formamidine,

[0421] According to still another preferred embodiment of the present invention, the active ingredient (B) is selected from the group consisting of: PGR's: abscisic acid, Amidochlor, Ancymidol, 6-Benzylaminopurine, Brassinolide, Butralin, Choline chloride, Cyclanilide, Daminozide, Dikegulac, Dimethipin, 2,6-Dimethylpuridine, Ethephon, Flumetralin, Flurprimidol, Fluthiacet, Forchlorfenuron, Gibberellic acid, Inabenfide, indole-3-acetic acid, Maleic hydrazide, Mefluidide, naphthaleneacetic acid, N-6 benzyladenine, Paclobutrazol, Prohydrojasmon, Thidiazuron, Triapenthenol, Tributyl phosphorotrithioate, 2,3,5-tri-iodobenzoic acid, Uniconazole,

[0422] According to still another preferred embodiment of the present invention, the active ingredient (B) is selected from the group consisting of: insecticides:acephate, chlorpyrifos, diazinon, dichlorvos, dimethoate, fenitrothion, methamidophos, methidathion, methyl-parathion, monocrotophos, phorate, profenofos, terbufos, aldicarb, carbaryl, carbofuran, carbosulfan, methomyl, thiodicarb, bifenthrin, cyfluthrin, cypermethrin, alpha-cypermethrin, zeta-cypermethrin, deltamethrin, esfenvalerate, lambda-cyhalothrin, permethrin, tefluthrin, diflubenzuron, flufenoxuron, lufenuron, teflubenzuron, spirotetramat; clothianidin, dinotefuran, imidacloprid, thiamethoxam, acetamiprid, thiacloprid; endosulfan, fipronil, abamectin, emamectin, spinosad, spinetoram, hydramethylnon; chlorfenapyr; fenbutatin oxide, indoxacarb, metaflumizone, flonicamid, flubendiamide, chlorantraniliprole, cyazypyr (HGW86), cyflumetofenmost preferred: acephate, chlorpyrifos, dimethoate, methamidophos, terbufos, aldicarb, carbofuran, bifenthrin, cypermethrin, alpha-cypermethrin, deltamethrin, lambda-cyhalothrin, tefluthrin, flufenoxuron, teflubenzuron, spirotetramat; clothianidin, imidacloprid, thiamethoxam, endosulfan, fipronil, abamectin, spinosad, spinetoram, hydramethylnon; chlorfenapyr; indoxacarb, metaflumizone, flubendiamide, chlorantraniliprole, cyazypyr (HGW86), cyflumetofen.

[0423] According to still another preferred embodiment of the present invention, the active ingredient (B) is selected from the group consisting of: fungicides:

azoxystrobin, Dimoxystrobin, Kresoxim-methyl, Orysastrobin, Pyraclostrobin, Trifloxystrobin, Bixafen, Boscalid, Isopyrazam, Metalaxyl, Penthiopyrad, 3-Difluoromethyl-1-methyl-1H-pyrazole-4-carboxylic acid (2′,4′,5′-trifluorobiphenyl-2-yl)-amide, N-(2-bicyclopropyl-2-yl-phenyl)-3-difluoromethyl-1-methyl-1H-pyrazole-4-carboxylic acid amide, Dimethomorph, Fluopicolide, Difenoconazole, Epoxiconazole, Fluquinconazole, Flusilazole, Flutriafol, Metconazol, Myclobutanil, Propiconazole, Prothioconazole, Tebuconazole, Tetraconazole, Triticonazole, Prochloraz, Carbendazim, Fluazinam, Cyprodinil, Pyrimethanil, Fludioxonil, Dodemorph, Fenpropimorph, Tridemorph, Fenpropidin, Iprodione, Vinclozolin, Famoxadone, Probenazole, Captan, Folpet, 5-ethyl-6-octyl-[1,2,4]triazolo[1,5-a]pyrimidine-7-ylamine, Mancozeb, Maneb, Metiram, Thiram, Dithianon, Fosetyl, Fosetyl-aluminium, Chlorothalonil, Thiophanate Methyl, Cymoxanil, Metrafenone, Spiroxamine, most preferred: Azoxystrobin, Dimoxystrobin, Kresoxim-methyl, Orysastrobin, Pyraclostrobin, Trifloxystrobin, Bixafen, Boscalid, Isopyrazam, Metalaxyl, Penthiopyrad, 3-Difluoromethyl-1-methyl-1H-pyrazole-4-carboxylic acid (2′,4′,5′-trifluorobiphenyl-2-yl)-amide, Dimethomorph, Difenoconazole, Epoxiconazole, Fluquinconazole, Metconazol, Propiconazole, Prothioconazole, Tebuconazole, Triticonazole, Prochloraz, Carbendazim, Cyprodinil, Pyrimethanil, Fenpropimorph, Tridemorph, Iprodione, 5-ethyl-6-octyl-[1,2,4]triazolo[1,5-a]pyrimidine-7-ylamine, Mancozeb, Maneb, Metiram, Dithianon, Chlorothalonil, Thiophanate Methyl, Cymoxanil, Metrafenone. According to still another preferred embodiment of the present invention, the active ingredient (B) is selected from the group consisting of: N-(3′,4′,5′-trifluorobiphenyl-2-yl)-3-difluoromethyl-1-methyl-1H-pyrazole-4-carboxamide,
[0424] N-[2-(4′-trifluoromethylthio)-biphenyl]-3-difluoromethyl-1-methyl-1H-pyrazole-4-carboxamide,
[0425] N-[2-(1,3-dimethylbutyl)-phenyl]-1,3-dimethyl-5-fluoro-1H-pyrazole-4-carboxamide,
[0426] N-(2-bicyclopropyl-2-yl-phenyl)-3-difluoromethyl-1-methyl-1H-pyrazole-4-carboxamide,
[0427] N-(cis-2-bicyclopropyl-2-yl-phenyl)-3-difluoromethyl-1-methyl-1H-pyrazole-4-carboxamide,
[0428] N-(trans-2-bicyclopropyl-2-yl-phenyl)-3-difluoromethyl-1-methyl-1H-pyrazole-4-carboxamide,
[0429] N-[1,2,3,4-tetrahydro-9-(1-methylethyl)-1,4-methanonaphthalen-5-yl]-3-(difluoromethyl)-1-methyl-1H-pyrazole-4-carboxamide.

[0430] According to still another preferred embodiment of the present invention, the active ingredient (B) is selected from the group consisting of herbicides:

Acetochlor, Dimethenamid, Metolachlor, Metazachlor, Glyphosate, Glufosinate, Sulfosate, Clodinafop, Fenoxaprop, Fluazifop, Haloxyfop, Paraquat, Phenmedipham, Clethodim, Cycloxydim, Profoxydim, Sethoxydim, Tepraloxydim, Pendimethalin, Trifluralin, Acifluorfen, Bromoxynil, Imazamethabenz, Imazamox, Imazapic, Imazapyr, Imazaquin, Imazethapyr, 2,4-D, Chloridazon, Clopyralid, Fluoroxypyr, Picloram, Picolinafen, Bensulfuron, Chlorimuron ethyl, Cyclosulfamuron, Iodosulfuron, Mesosulfuron, Metsulfuron-methyl, Nicosulfuron, Rimsulfuron, Triflusulfuron, Atrazine, Hexazinone, Diuron, Florasulam, Pyroxasulfone, Bentazone, Cinidon-ethly, Cinmethylin, Dicamba, Diflufenzopyr, Quinclorac, Quinmerac, Mesotrione, Saflufenacil, Topramezone;
most preferred:
Acetochlor, Dimethenamid, Metolachlor, Metazachlor, Glyphosate, Glufosinate, Sulfosate, Fenoxaprop, Paraquat, Cycloxydim, Profoxydim, Sethoxydim, Tepraloxydim, Pendimethalin, Acifluorfen, Imazamethabenz, Imazamox, Imazapic, Imazapyr, Imazaquin, Imazethapyr, 2,4-D, Chloridazon, Picloram, Picolinafen, Cyclosulfamuron, Triflusulfuron, Atrazine, Pyroxasulfone, Bentazone, Cinidon-ethly, Cinmethylin, Dicamba, Diflufenzopyr, Quinclorac, Quinmerac, Mesotrione, Saflufenacil, Topramezone

[0431] In one embodiment a plant selected from the group of transgenic plants with at least one transgenic modification as compared to a corresponding wild-type plant with an increased or generated activities of a polypeptide with an activity as indicated in table B, column 5, line No 1, 5, 7, 10, 11, 12, 16, 19, 20, 21, 23, 25, 27, 28, 30, 31, 33, 37, 39, 40, 42, 43, 91, 105, 107, 112, 150, 159, 164, 165, 166, 167, 168, 169, 170, 171, 172, 173, 174, 175, 176, 177, 178, 182, 186, 187, 188, 189, 190, 194, 196, 203, 204, 205, 206, 207, 209, 210, 211, 213, respectively plants with an increased or generated activities of a polypeptide according to the sequence number as depicted in table B, column 3, line No 1, 5, 7, 10, 11, 12, 16, 19, 20, 21, 23, 25, 27, 28, 30, 31, 33, 37, 39, 40, 42, 43, 91, 105, 107, 112, 150, 159, 164, 165, 166, 167, 168, 169, 170, 171, 172, 173, 174, 175, 176, 177, 178, 182, 186, 187, 188, 189, 190, 194, 196, 203, 204, 205, 206, 207, 209, 210, 211, 213, respectively plants with an increased or generated expression of the gene as depicted in table B, column 1, line No 1, 5, 7, 10, 11, 12, 16, 19, 20, 21, 23, 25, 27, 28, 30, 31, 33, 37, 39, 40, 42, 43, 91, 105, 107, 112, 150, 159, 164, 165, 166, 167, 168, 169, 170, 171, 172, 173, 174, 175, 176, 177, 178, 182, 186, 187, 188, 189, 190, 194, 196, 203, 204, 205, 206, 207, 209, 210, 211, 213;

in combination with the treatment with an effective amount of any of the active ingredients selected from the group consisting of
acephate, chlorpyrifos, diazinon, dichlorvos, dimethoate, fenitrothion, methamidophos, methidathion, methyl-parathion, monocrotophos, phorate, profenofos, terbufos, aldicarb, carbaryl, carbofuran, carbosulfan, methomyl, thiodicarb, bifenthrin, cyfluthrin, cypermethrin, alpha-cypermethrin, zeta-cypermethrin, deltamethrin, esfenvalerate, lambda-cyhalothrin, permethrin, tefluthrin, diflubenzuron, flufenoxuron, lufenuron, teflubenzuron, spirotetramat; clothianidin, dinotefuran, imidacloprid, thiamethoxam, acetamiprid, thiacloprid; endosulfan, fipronil, abamectin, emamectin, spinosad, spinetoram, hydramethylnon; chlorfenapyr; fenbutatin oxide, indoxacarb, metaflumizone, flonicamid, flubendiamide, chlorantraniliprole, cyazypyr (HGW86), cyflumetofen,
Azoxystrobin, Dimoxystrobin, Kresoxim-methyl, Orysastrobin, Pyraclostrobin, Trifloxystrobin, Bixafen, Boscalid, Isopyrazam, Metalaxyl, Penthiopyrad, 3-Difluoromethyl-1-methyl-1H-pyrazole-4-carboxylic acid (2′,4′,5′-trifluorobiphenyl-2-yl)-amide, N-(2-bicyclopropyl-2-yl-phenyl)-3-difluoromethyl-1-methyl-1H-pyrazole-4-carboxylic acid amide, Dimethomorph, Fluopicolide, Difenoconazole, Epoxiconazole, Fluquinconazole, Flusilazole, Flutriafol, Metconazol, Myclobutanil, Propiconazole, Prothioconazole, Tebuconazole, Tetraconazole, Triticonazole, Prochloraz, Carbendazim, Fluazinam, Cyprodinil, Pyrimethanil, Fludioxonil, Dodemorph, Fenpropimorph, Tridemorph, Fen-propidin, Iprodione, Vinclozolin, Famoxadone, Probenazole, Captan, Folpet, 5-ethyl-6-octyl-[1,2,4]-triazolo[1,5-a]pyrimidine-7-ylamine, Mancozeb, Maneb, Metiram, Thiram, Dithianon, Fosetyl, Fosetyl-aluminium, Chlorothalonil, Thiophanate Methyl, Cymoxanil, Metrafenone and Spiroxamine,
as depicted detailed in Table C.

[0432] In one embodiment of the invention the combination of the transgenic modification, e.g. the increased or generated activity in the plant and the active ingredient is depicted in table C.

[0433] In one embodiment 2, 3, 4, 5, 6, 7, 8, 9, 10 or more of the above mentioned active ingredients are used simultaneously for the treatment.

[0434] In one embodiment a plant selected from the group of transgenic plants with at least one transgenic modification as compared to a corresponding wild-type plant with an increased or generated activities of a polypeptide with an activity as indicated in table B, column 5, line No 1, 5, 7, 10, 11, 12, 16, 19, 20, 21, 23, 25, 27, 28, 30, 31, 33, 37, 39, 40, 42, 43, 91, 105, 107, 112, 150, 159, 164, 165, 166, 167, 168, 169, 170, 171, 172, 173, 174, 175, 176, 177, 178, 182, 186, 187, 188, 189, 190, 194, 196, 203, 204, 205, 206, 207, 209, 210, 211, 213, respectively plants with an increased or generated activities of a polypeptide according to the sequence number as depicted in table B, column 3, line No 1, 5, 7, 10, 11, 12, 16, 19, 20, 21, 23, 25, 27, 28, 30, 31, 33, 37, 39, 40, 42, 43, 91, 105, 107, 112, 150, 159, 164, 165, 166, 167, 168, 169, 170, 171, 172, 173, 174, 175, 176, 177, 178, 182, 186, 187, 188, 189, 190, 194, 196, 203, 204, 205, 206, 207, 209, 210, 211, 213, respectively plants with an increased or generated expression of the gene as depicted in table B, column 1, line No 1, 5, 7, 10, 11, 12, 16, 19, 20, 21, 23, 25, 27, 28, 30, 31, 33, 37, 39, 40, 42, 43, 91, 105, 107, 112, 150, 159, 164, 165, 166, 167, 168, 169, 170, 171, 172, 173, 174, 175, 176, 177, 178, 182, 186, 187, 188, 189, 190, 194, 196, 203, 204, 205, 206, 207, 209, 210, 211, 213;

in combination with the treatment with an effective amount of any of the active ingredients selected from the group consisting of fipronil and pyraclostrobin.

[0435] If the component (A) is a sulfated glucan as defined above, the active ingredient (B) can also be the active ingredient maneb.

[0436] In another aspect, the present invention relates to a composition comprising an ex-tract from seaweed and a pesticide. The seaweed extract is preferably obtained according to the methods as described in WO 93/06730, which is hereby incorporated by reference. Particularly, the extract is obtained from brown algae, wherein the brown algae is specifically from the Phaeophyceae type (in particular Fucales or Laminariales). In general, the extraction can be accomplished by basic hydrolysis of the respective seaweed in the presence of a reducing agent such as an alkali metal borhydride. Then, the resulting hydrolysate is neutralised to a pH of about 6 to 8, e.g. by the addition of a strong acid. The product is filtrated and optionally diafiltrated or an electrodialysis may be carried out (cf. WO 93/06730).

[0437] The following list M of pesticides together with one or more of the above mentioned active ingredients (B) according to the invention can be used and potential synergistic effects might be produced, whereby the list is intended to illustrate the possible combinations, but not to impose any limitation:

[0438] M.1. Organo(thio)phosphates: acephate, azamethiphos, azinphos-ethyl, azinphos-methyl, chlorethoxyfos, chlorfenvinphos, chlormephos, chlorpyrifos, chlorpyrifos-methyl, coumaphos, cyanophos, demeton-S-methyl, diazinon, dichlorvos/DDVP, dicrotophos, dimethoate, dimethylvinphos, disulfoton, EPN, ethion, ethoprophos, famphur, fenamiphos, fenitrothion, fenthion, flupyrazophos, fosthiazate, heptenophos, isoxathion, malathion, mecarbam, methamidophos, methidathion, mevinphos, monocrotophos, naled, omethoate, oxydemeton-methyl, parathion, parathion-methyl, phenthoate, phorate, phosalone, phosmet, phosphamidon, phoxim, pirimiphos-methyl, profenofos, propetamphos, prothiofos, pyraclofos, pyridaphenthion, quinalphos, sulfotep, tebupirimfos, temephos, terbufos, tetrachlorvinphos, thiometon, triazophos, trichlorfon, vamidothion;

[0439] M.2. Carbamates: aldicarb, alanycarb, bendiocarb, benfuracarb, butocarboxim, butoxycarboxim, carbaryl, carbofuran, carbosulfan, ethiofencarb, fenobucarb, formetanate, furathiocarb, isoprocarb, methiocarb, methomyl, metolcarb, oxamyl, pirimicarb, propoxur, thiodicarb, thiofanox, trimethacarb, XMC, xylylcarb, triazamate;

[0440] M.3. Pyrethroids: acrinathrin, allethrin, d-cis-trans allethrin, d-trans allethrin, bifenthrin, bioallethrin, bioallethrin S-cylclopentenyl, bioresmethrin, cycloprothrin, cyfluthrin, beta-, yfluthrin, cyhalothrin, lambda-cyhalothrin, gamma-cyhalothrin, cypermethrin, alpha-cypermethrin, beta-cypermethrin, theta-cypermethrin, zeta-cypermethrin, cyphenothrin, deltamethrin, empenthrin, esfenvalerate, etofenprox, fenpropathrin, fenvalerate, flucythrinate, flumethrin, tau-fluvalinate, halfenprox, imiprothrin, permethrin, phenothrin, prallethrin, resmethrin, RU 15525, silafluofen, tefluthrin, tetramethrin, tralomethrin, transfluthrin, ZXI 8901;

[0441] M.4. Juvenile hormone mimics: hydroprene, kinoprene, methoprene, fenoxycarb, pyriproxyfen;

[0442] M.5. Nicotinic receptor agonists/antagonists compounds: acetamiprid, bensultap, cartap hydrochloride, clothianidin, dinotefuran, imidacloprid, thiamethoxam, nitenpyram, nicotine, spinosad (allosteric agonist), thiacloprid, thiocyclam, thiosultap-sodium and AKD1022.

[0443] M.6. GABA gated chloride channel antagonist compounds: chlordane, endosulfan, gamma-HCH (lindane); acetoprole, ethiprole, fipronil, pyrafluprole, pyriprole, vaniliprole, the phenylpyrazole compound of formula M^{6.1}

[chemical structure]

[0444] M.7. Chloride channel activators: abamectin, emamectin benzoate, milbemectin, lepimectin;

[0445] M.8. METI I compounds: fenazaquin, fenpyroximate, pyrimidifen, pyridaben, tebufenpyrad, tolfenpyrad, flufenerim, rotenone;

[0446] M.9. METI II and III compounds: acequinocyl, fluacyprim, hydramethylnon;

[0447] M.10. Uncouplers of oxidative phosphorylation: chlorfenapyr, DNOC;

[0448] M.11. Inhibitors of oxidative phosphorylation: azocyclotin, cyhexatin, diafenthiuron, fenbutatin oxide, propargite, tetradifon;

[0449] M.12. Moulting disruptors: cyromazine, chromafenozide, halofenozide, methoxyfenozide, tebufenozide;

[0450] M.13. Synergists: piperonyl butoxide, tribufos;

[0451] M.14. Sodium channel blocker compounds: indoxacarb, metaflumizone;

[0452] M.15. Fumigants: methyl bromide, chloropicrin sulfuryl fluoride;

[0453] M.16. Selective feeding blockers: crylotie, pymetrozine, flonicamid;

[0454] M.17. Mite growth inhibitors: clofentezine, hexythiazox, etoxazole;

[0455] M.18. Chitin synthesis inhibitors: buprofezin, bistrifluoron, chlorfluazuron, diflubenzuron, flucycloxuron, flufenoxuron, hexaflumuron, lufenuron, novaluron, noviflumuron, teflubenzuron, triflumuron;

[0456] M.19. Lipid biosynthesis inhibitors: spirodiclofen, spiromesifen, spirotetramat;

[0457] M.20. octapaminergic agonists: amitraz;

[0458] M.21. ryanodine receptor modulators: flubendiamide;

[0459] M.22. Various: aluminium phosphide, amidoflumet, benclothiaz, benzoximate, bifenazate, borax, bromopropylate, cyanide, cyenopyrafen, cyflumetofen, chinomethionate, dicofol, fluoroacetate, phosphine, pyridalyl, pyrifluquinazon, sulfur, organic sulfur compounds, tartar emetic; pyrimidinyl alkynylether compounds M^{22.1} or thiadiazolyl alkynylether compounds M^{22.2}:

[chemical structure]

wherein R^{M-22} is methyl or ethyl and Het* is 3,3-dimethylpyrrolidin-1-yl, 3-methylpiperidin-1-yl, 3,5-dimethylpiperidin-1-yl, 3-trifluormethylpiperidin-1-yl, hexahydroazepin-1-yl, 2,6-dimethylhexahydroazepin-1-yl or 2,6-dimethylmorpholin-4-yl.

[0460] M.23. N—R′-2,2-dihalo-1-R″cyclo-propanecarboxamide-2-(2,6-dichloro-alpha, alpha, alpha-tri-fluoro-p-tolyl)-hydrazone or N—R′-2,2-di(R′″)propionamide-2-(2,6-dichloro-alpha, alpha, alpha-trifluoro-p-tolyl)-hydrazone, wherein R′ is methyl or ethyl, halo is chloro or bromo, R″ is hydrogen or methyl and R′″ is methyl or ethyl;

[0461] M.24. Anthranilamides: chloranthraniliprole, the compound of formula M²⁴ 1

[chemical structure]

[0462] M.25. Malononitrile compounds: CF₂HCF₂CF₂CF₂CH₂C(CN)₂CH₂CH₂CF₃ (2-(2,2,3,3,4,4,5,5-octafluoropentyl)-2-(3,3,3-trifluoro-propyl)malononitrile), CF₃(CH₂)₂C(CN)₂CH₂(CF₂)₅CF₂H, (2-(2,2,3,3,4,4,5,5,6,6,7,7-Dodecafluoro-heptyl)-2-(3,3,3-trifluoro-propyl)-malononitrile), CF₃(CH₂)₂C(CN)₂(CH₂)₂C(CF₃)₂F (2-(3,4,4,4-Tetrafluoro-3-trifluoromethyl-butyl)-2-(3,3,3-trifluoro-propyl)-malononitrile), CF₃(CH₂)₂C(CN)₂(CH₂)₂(CF₂)₃CF₃ (2-(3,3,4,4,5,5,6,6,6-Nonafluoro-hexyl)-2-(3,3,3-trifluoro-propyl)-malononitrile), CF₂H(CF₂)₃CH₂C(CN)₂CH₂(CF₂)₃CF₂H (2,2-Bis-(2,2,3,3,4,4,5,5-octafluoro-pentyl)-malononitrile), CF₃(CH₂)₂C(CN)₂CH₂(CF₂)₃CF₃ (2-(2,2,3,3,4,4,5,5,5-Nonafluoro-pentyl)-2-(3,3,3-trifluoro-propyl)-malononitrile), CF₃(CF₂)₂CH₂C(CN)₂CH₂(CF₂)₃CF₂H (2-(2,2,3,3,4,4,4-Heptafluoro-butyl)-2-(2,2,3,3,4,4,5,5-octafluoro-pentyl)-malononitrile), CF₃CF₂CH₂C(CN)₂CH₂(CF₂)₃CF₂H (2-(2,2,3,3,4,4,5,5-Octafluoro-pentyl)-2-(2,2,3,3,3-pentafluoro-propyl)-malononitrile), CF₂HCF₂CF₂CF₂CH₂C(CN)₂CH₂CH₂CF₂CF₃(2-(2,2,3,3,4,4,5,5-octafluoropentyl)-2-(3,3,4,4,4-pentafluorobutyl)-malonodinitrile), CF₃(CH₂)₂C(CN)₂CH₂(CF₂)₃CF₂H (2-(2,2,3,3,4,4,5,5-octafluoropentyl)-2-(3,3,3-trifluoro-butyl)-malononitrile);

[0463] M.26. Microbial disruptors: Bacillus thuringiensis subsp. Israelensi, Bacillus sphaericus, Bacillus thuringiensis subsp. Aizawai, Bacillus thuringiensis subsp. Kurstaki, Bacillus thuringiensis subsp. Tenebrionis;

[0464] The commercially available compounds of the group M may be found in The Pesticide Manual, 13^{th} Edition, British Crop Protection Council (2003) among other publications.

[0465] Thioamides of formula M^{6.1} and their preparation have been described in WO 98/28279. Lepimectin is known from Agro Project, PJB Publications Ltd, November 2004. Benclothiaz and its preparation have been described in EP-A1 454621. Methidathion and Paraoxon and their preparation have been described in Farm Chemicals Handbook, Volume 88, Meister Publishing Company, 2001. Acetoprole and its preparation have been described in WO 98/28277. Metaflumizone and its preparation have been described in EP-A1 462 456. Flupyrazofos has been described in Pesticide Science 54, 1988, p. 237-243 and in U.S. Pat. No. 4,822,779. Pyrafluprole and its preparation have been described in JP 2002193709 and in WO 01/00614. Pyriprole and its preparation have been described in WO 98/45274 and in U.S. Pat. No. 6,335,357. Amidoflumet and its preparation have been described in U.S. Pat. No. 6,221,890 and in JP 21010907. Flufenerim and its preparation have been described in WO 03/007717 and in WO 03/007718. AKD 1022 and its preparation have been described in U.S. Pat. No. 6,300,348. Chloranthraniliprole has been described in WO 01/70671, WO 03/015519 and WO 05/118552. Anthranilamide derivatives of formula M^{24.1} have been described in WO 01/70671, WO 04/067528 and WO 05/118552. Cyflumetofen and its preparation have been de-scribed in WO 04/080180. The aminoquinazolinone compound pyrifluquinazon has been described in EP A 109 7932. The alkynylether compounds M^{22.1} and M^{22.2} are described e.g. in JP 2006131529. Organic sulfur compounds have been described in WO 2007060839. The malononitrile compounds have been described in WO 02/089579, WO 02/090320, WO 02/090321, WO 04/006677, WO 05/068423, WO 05/068432 and WO 05/063694.

[0466] The pesticide that can be used according to this aspect of the invention may be selected from fungicides, herbices and insecticides. Also maneb is a suitable pesticide. Particularly, the pesticide is selected from the active ingredient (B) and preferred the active ingredients (B) as indicated above.

[0467] Thus, it was surprisingly found within the framework of the present invention that the combination of chemical agents, e.g. at least one active ingredient, and at least one transgenic modification, which does not confer a resistance against the active ingredient, leads to a synergistic effect, i.e. the effectiveness of the combination is higher compared to the use of the individual components. Thereby, synergistic effects conferring plant productivity enhancement and/or plant health enhancement and/or pest control can be obtained.

[0468] Consequently, according to another aspect, the present invention provides the use of a composition as defined according to the present invention for increasing the health, the productivity, the yield and/or improving the vigor of a transgenic plant of the invention, preferably an agricultural transgenic plant.

[0469] The present invention further provides a method for increasing productivity of a transgenic plant, which comprises treating the location where the plant is growing or is expected to grow, and/or the seeds from which the plant grows with an effective amount of the active ingredient (B) as defined herein.

[0470] According to a further embodiment, the present invention provides a method for increasing the productivity of a transgenic plant, which comprises treating the plant, the location where the plant is growing or is expected to grow, and/or the seeds from which the plant grows with an effective amount of the active ingredient (B) as defined herein.

[0471] According to the present invention, “increased yield” of an agricultural plant means that the yield of a product of the respective plant is increased by a measurable amount over the yield of the same product of the plant produced under the same conditions, but without the application of the present invention. According to the present invention, it is preferred that the yield be increased by at least 0.5%, more preferred at least 1%, even more preferred at least 2%, still more preferred at least 4%, preferably 5% or even more.

[0472] According to the present invention, “improved plant vigor” means that certain crop characteristics are increased or improved by a measurable or noticeable amount over the same factor of the plant produced under the same conditions, but without the application of the present invention, such as: delay of senescence, root growth, longer panicles, increased or improved plant stand, the plant weight, plant height, emergence, improved visual appearance, improved protein content, more developed root system, tillering increase, increase in plant height, bigger leaf blade, less dead basal leaves, stronger tillers, greener leaf color, pigment content, photosynthetic activity, less fertilizers needed, less seeds needed, more productive tillers, earlier flowering, early grain maturity, less plant verse (lodging), increased shoot growth, early and improved germination, improved vitality of the plant, improved quality of the plant, improved quality of the fruits or vegetables (or other products produced by the plant), improved self defence mechanism of the plant such as induced tolerance against fungi, bacteria, viruses and/or insects.

[0473] The improvement of the plant vigor according to the present invention particularly means that the improvement of any one or several or all of the above mentioned plant characteristics are improved independently of the pesticidal action of the composition or active ingredients.

[0474] According to one embodiment of the present invention, the inventive compositions are used for yield increase of an agricultural transgenic plant.

[0475] According to a further embodiment of the present invention, the inventive compositions are used for stimulating the natural defensive reactions of a plant against a pathogen and/or a pest. Thereby, the plant can be protected against unwanted microorganisms such as phytopathogenic fungi, bacteria, viruses and insects and it has been found that the inventive compositions result in plant strengthening effects. Therefore, they are useful for mobilizing the plant's defense mechanisms against the attack of unwanted microorganisms. Consequently, the plant becomes tolerant or resistant towards these microorganisms. Unwanted microorganisms in this context are phytopathogenic fungi and/or bacteria and/or viruses and/or insects, preferably phytopathogenic fungi, bacteria and/or viruses, wherein, according to the present invention, the treated plant may develop increased defense mechanism against one of these pathogens/pests or against two, three or all of these pathogens/pests.

[0476] According to one embodiment of the described methods of the invention the treatment is made to transgenic vegetables and transgenic field crops. According to a further embodiment of the described methods of the invention the treatment is made to transgenic cereals such as for example wheat, barley or rye. In one specific embodiment, the method of the invention can be applied to transgenic field crops, such as soy-beans, corn, cotton, wheat, barley, rye, rice, sugar beets, sugar cane, sunflower and/or oilseed rape/canola, in particular soybeans, corn, cotton, sugar cane, oilseed rape/canola, tobacco, common beans, wheat, barley, rye, peas, and others. In relation to these crops the method is preferably applied by treating the seeds or the plants. In this embodiment it may be preferred that the plants are treated with two to three applications per season.

[0477] According to another embodiment of the described methods of the invention the treatment is made to transgenic potatoes, tomatoes, cucurbits, cucumbers, melons, watermelons, garlic, onions, bananas, peanuts, carrots, cabbage, peppers, common beans, peas, lentils and/or lettuce, in particular potatoes, tomatoes, cucurbits, cucumbers, melons, watermelons, garlic, onions, and/or lettuce.

[0478] According to another embodiment of the described methods of the invention the treatment is made to transgenic apples, pears, stone fruits, or citrus, in particular apples, stone fruits, citrus, pines, snip grass.

[0479] According to another embodiment of the described methods of the invention, the treatment is made to transgenic strawberries, cherries, almonds, mango, papaya, blueberries and/or grapes in particular strawberries and/or cherries.

[0480] According to another embodiment of the described methods of the invention, the treatment is made to transgenic turf and/or ornamentals.

[0481] According to another embodiment of the described methods of the invention, the treatment is made to transgenic tea, tobacco and/or coffee.

[0482] According to one embodiment of the described methods of the invention, two to ten, three to eight or four to six treatments with the compounds are made during a season.

[0483] According to one embodiment of the invention, the inventive composition is applied via the leaves or to the soil. According to another embodiment of the described methods of the invention, the treatment(s) are carried out as foliar application. In one preferred embodiment of the present invention the method according to the invention is carried out as foliar application or spray application, respectively. Preferably, one, two, three, four, five and up to ten applications during one season are carried out, specifically more than two applications, and up to 10 applications. Also preferred more than two applications, and up to 5 applications during a season are carried out.

[0484] The inventive compositions are also suitable for dressing applications on plant propagation material. The latter term embraces seeds of all kinds (fruit, tubers, grains), cuttings, cut shoots and the like. One particular field of application is the treatment of all kinds of seeds.

[0485] The method according to the invention is preferably carried out as foliar application when applied to transgenic fruit and vegetables, such as potatoes, tomatoes, cucurbits, preferably cucumbers, melons, watermelons, garlic, onions, and lettuce. Preferably more than two applications and up to 5 or up to 10 applications during a season are carried out.

[0486] The application rates are usually between 0.01 and 2.0 kg, preferably up to 1.0 kg of active ingredient per hectare.

[0487] In one embodiment the application rates are usually between 0.0001 and 2.0 kg, preferably between 0.0001 and 1.0 kg of active ingredient per hectare.

[0488] According to a further aspect, the present invention relates to seed, comprising one of the inventive compositions as defined herein in an amount of from 0.1 g to 1 kg per 100 kg of seeds.

[0489] Furthermore, it has been found that the inventive compositions achieve markedly enhanced action against plant pathogens (insects and harmful fungi).

[0490] In general, if laminarin is used, it can be preferred to use it in doses of between 0.005 g and 100 g per liter for treating the leaves, and of between 1 g and 100 g per 100 kg for treating the seeds.

[0491] The active ingredient mixtures of the invention can be used in the form of premix formulations or the active ingredients can be applied to the area, plant or seed to be treated simultaneously or in immediate succession, if desired together with further carriers, surfactants or other application-promoting adjuvants customarily employed in formulation technology. Besides an effective amount of the active ingredients, the inventive composition can contain an agriculturally acceptable carrier and/or vehicle. The composition may be in solid form, for example in the form of a powder or granules, or in liquid form, for example in the form of an aqueous solution.

[0492] The active ingredients or compositions used according to the present invention can be converted into the formulations conventionally used for pesticides, for example solutions, emulsions, suspensions, dusts, powders, pastes and granules. The use form depends on the particular purpose; in any case, it should ensure fine and uniform distribution of the compound according to the invention.

[0493] The present invention furthermore provides a composition as described above with at least one one solid or liquid carrier.

[0494] Best results are obtained when a formulation is used which supports the transport of the active compounds into the plants, and the distribution within the entire plant.

[0495] The compositions generally comprise between 0.1 and 95%, preferably between 0.5 and 90%, by weight of active ingredient.

[0496] When employed in plant protection, the amounts applied are, depending on the kind of effect desired, between 0.01 and 2.0 kg, preferably between 0.1 and 1 kg of active ingredient per ha.

[0497] In one embodiment the application the amounts applied are, depending on the kind of effect desired, between 0.0001 and 2.0 kg, preferably between 0.1 and 1 kg of active ingredient per ha.

[0498] Seed can be treated by methods known to the person skilled in the art, such as, for example, seed dressing, seed coating, seed dusting, seed soaking and seed pelleting.

[0499] In the treatment of seed, the amounts of active ingredient employed are generally from 1 to 1000 g/100 kg of seed, preferably from 1 to 200 g/100 kg, in particular from 1 to 100 g/100 kg.

[0500] When used in the protection of materials or stored products, the amount of active ingredient applied depends on the kind of application area and on the desired effect. Amounts customarily applied in the protection of materials are, for example, 0.001 g to 2 kg, preferably 0.005 g to 1 kg, of active compound per cubic meter of treated material.

[0501] The formulations are prepared in a known manner, for example by extending the active compound with solvents and/or carriers, if desired using emulsifiers and dispersants. Solvents/auxiliaries which are suitable are essentially:
[0502] water, aromatic solvents (for example Solvesso products, xylene), paraffins (for example mineral oil fractions), alcohols (for example methanol, butanol, pentanol, benzyl alcohol), ketones (for example cyclohexanone, gamma-butyrolactone), pyrrolidones (NMP, NOP), acetates (glycol diacetate), glycols, fatty acid dimethylamides, fatty acids and fatty acid esters. In principle, solvent mixtures may also be used,
[0503] carriers such as ground natural minerals (for example kaolins, clays, talc, chalk) and ground synthetic minerals (for example finely divided silica, silicates); emulsifiers such as nonionic and anionic emulsifiers (for example polyoxyethylene fatty alcohol ethers, alkylsulfonates and arylsulfonates) and dispersants such as lignosulfite waste liquors and methylcellulose.

[0504] Suitable surfactants are alkali metal, alkaline earth metal and ammonium salts of lignosulfonic acid, naphthalenesulfonic acid, phenolsulfonic acid, dibutylnaphthalene-sulfonic acid, alkylarylsulfonates, alkyl sulfates, alkylsulfonates, fatty alcohol sulfates, fatty acids and sulfated fatty alcohol glycol ethers, furthermore condensates of sulfonated naphthalene and naphthalene derivatives with formaldehyde, condensates of naphthalene or of naphthalenesulfonic acid with phenol and formaldehyde, polyoxyethylene octylphenol ether, ethoxylated isooctylphenol, octylphenol, nonylphenol, alkylphenol polyglycol ethers, tributylphenyl polyglycol ether, tristearyl-phenyl polyglycol ether, alkylaryl polyether alcohols, alcohol and fatty alcohol/ethylene oxide condensates, ethoxylated castor oil, polyoxyethylene alkyl ethers, ethoxylated polyoxypropylene, lauryl alcohol polyglycol ether acetal, sorbitol esters, lignosulfite waste liquors and methylcellulose.

[0505] Suitable for the preparation of directly sprayable solutions, emulsions, pastes or oil dispersions are mineral oil fractions of medium to high boiling point, such as kerosene or diesel oil, furthermore coal tar oils and oils of vegetable or animal origin, aliphatic, cyclic and aromatic hydrocarbons, for example toluene, xylene, paraffin, tetrahydronaphthalene, alkylated naphthalenes or their derivatives, methanol, ethanol, propanol, butanol, cyclohexanol, cyclohexanone, isophorone, strongly polar solvents, for example dimethyl sulfoxide, N-methylpyrrolidone and water.

[0506] Powders, materials for spreading and dustable products can be prepared by mixing or concomitantly grinding the active substances with a solid carrier.

[0507] Granules, for example coated granules, impregnated granules and homogeneous granules, can be prepared by binding the active compounds to solid carriers.

[0508] Examples of solid carriers are mineral earths such as silica gels, silicates, talc, kaolin, attaclay, limestone, lime, chalk, bole, loess, clay, dolomite, diatomaceous earth, calcium sulfate, magnesium sulfate, magnesium oxide, ground synthetic materials, fertilizers, such as, for example, ammonium sulfate, ammonium phosphate, ammonium nitrate, ureas, and products of vegetable origin, such as cereal meal, tree bark meal, wood meal and nutshell meal, cellulose powders and other solid carriers.

[0509] Formulations for seed treatment may further comprise binders and/or gelants and if appropriate dyes.

[0510] Binders can be added to increase the adhesion of the active compounds to the seed after the treatment. Suitable binders are for example EO/PO block copolymer surfactants, but also polyvinyl alcohols, polyvinylpyrrolidones, polyacrylates, polymethacrylates, polybutenes, polyisobutylenes, polystyrenes, polyethyleneamines, polyethyleneamides, polyethyleneimines (Lupasol®, Polymin®), polyethers, polyurethanes, polyvinyl acetates, Tylose and copolymers of these polymers. A suitable gelant is for example carrageen (Satiagel®).

[0511] In general, the formulations comprise from 0.01 to 95% by weight, preferably from 0.1 to 90% by weight, of the active compound. The active compounds are employed in a purity of from 90% to 100%, preferably 95% to 100% (according to NMR spectrum).

[0512] The concentrations of active compound in the ready-to-use preparations can be varied within relatively wide ranges. In general, they are between 0.0001 and 10%, preferably between 0.01 and 1%.

[0513] The active compounds can also be used with great success in the ultra-low-volume (ULV) process, it being possible to apply formulations with more than 95% by weight of active compound or even the active compound without additives.

[0514] For the treatment of seed, the formulations in question give, after two-to-tenfold dilution, active compound concentrations of from 0.01 to 60% by weight, preferably from 0.1 to 40% by weight, in the ready-to-use preparations.

[0515] The following are examples of formulations according to the invention: Products for dilution with water

### A Water-Soluble Concentrates (SL, LS)

[0516] 10 parts by weight of active ingredient are dissolved with 90 parts by weight of water or with a water-soluble solvent. As an alternative, wetters or other auxiliaries are added. The active compound dissolves upon dilution with water. This gives a formulation having an active compound content of 10% by weight.

### B Dispersible Concentrates (DC)

[0517] 20 parts by weight of active ingredient are dissolved in 70 parts by weight of cyclo-hexanone with addition of 10 parts by weight of a dispersant, for example polyvinylpyrrolidone. Dilution with water gives a dispersion. The active compound content is 20% by weight.

### C Emulsifiable Concentrates (EC)

[0518] 15 parts by weight of active ingredient are dissolved in 75 parts by weight of xylene with addition of calcium dodecylbenzenesulfonate and castor oil ethoxylate (in each case 5 parts by weight). Dilution with water gives an emulsion. The formulation has an active compound content of 15% by weight.

### D Emulsions (EW, EO, ES)

[0519] 25 parts by weight of active ingredient are dissolved in 35 parts by weight of xylene with addition of calcium dodecylbenzenesulfonate and castor oil ethoxylate (in each case 5 parts by weight). This mixture is added to 30 parts by weight of water by means of an emulsifying machine (e.g. Ultraturrax) and made into a homogeneous emulsion. Dilution with water gives an emulsion. The formulation has an active compound content of 25% by weight.

### E Suspensions (SC, OD, FS)

[0520] In an agitated ball mill, 20 parts by weight of active ingredient are comminuted with addition of 10 parts by weight of dispersants and wetters and 70 parts by weight of water or an organic solvent to give a fine active compound suspension. Dilution with water gives a stable suspension of the active compound. The active compound content in the formulation is 20% by weight.

### F Water-Dispersible Granules and Water-Soluble Granules (WG, SG)

[0521] 50 parts by weight of active ingredient are ground finely with addition of 50 parts by weight of dispersants and wetters and made into water-dispersible or water-soluble granules by means of technical appliances (for example extrusion, spray tower, fluidized bed). Dilution with water gives a stable dispersion or solution of the active compound. The formulation has an active compound content of 50% by weight.

### G Water-Dispersible Powders and Water-Soluble Powders (WP, SP, SS, WS)

[0522] 75 parts by weight of active ingredient are ground in a rotor-stator mill with addition of 25 parts by weight of dispersants, wetters and silica gel. Dilution with water gives a stable dispersion or solution of the active compound. The active compound content of the formulation is 75% by weight.

### Products to be Applied Undiluted

### H Dustable Powders (DP, DS)

[0523] 5 parts by weight of active ingredient are ground finely and mixed intimately with 95 parts by weight of finely divided kaolin. This gives a dustable product with an active compound content of 5% by weight.

### I Granules (GR, FG, GG, MG)

[0524] 0.5 part by weight of active ingredient is ground finely and associated with 99.5 parts by weight of carriers. Current methods are extrusion, spray-drying or the fluidized bed. This gives granules with an active compound content of 0.5% by weight to be applied undiluted.

### J ULV Solutions (UL)

[0525] 10 parts by weight of active ingredient are dissolved in 90 parts by weight of an organic solvent, for example xylene. This gives a product with an active compound con-tent of 10% by weight to be applied undiluted.

[0526] Seed treatment typically utilizes water-soluble concentrates (LS), suspensions (FS), dusts (DS), water-dispersible and water-soluble powders (WS, SS), emulsions (ES), emulsifiable concentrates (EC) and gel formulations (GF). These formulations can be applied neat or preferably diluted to the seed. The application can take place prior to sowing.

[0527] Preference is given to using FS formulations for seed treatment. Such formulations typically comprise from 1 to 800 g/l of active compound, from 1 to 200 g/l of surfactants, from 0 to 200 g/l of antifreeze, from 0 to 400 g/l of binder, from 0 to 200 g/l of dyes and solvent, preferably water.

[0528] The active compounds can be used as such, in the form of their formulations or the use forms prepared therefrom, for example in the form of directly sprayable solutions, powders, suspensions or dispersions, emulsions, oil dispersions, pastes, dustable products, materials for spreading, or granules, by means of spraying, atomizing, dusting, spreading or pouring. The use forms depend entirely on the intended purposes; the intention is to ensure in each case the finest possible distribution of the active compounds used according to the invention.

[0529] Aqueous use forms can be prepared from emulsion concentrates, pastes or wettable powders (sprayable powders, oil dispersions) by adding water. To prepare emulsions, pastes or oil dispersions, the substances, as such or dissolved in an oil or solvent, can be homogenized in water by means of a wetting agent, tackifier, dispersant or emulsifier. Alternatively, it is also possible to prepare concentrates composed of active substance, wetter, tackifier, dispersant or emulsifier and, if appropriate, solvent or oil, and such concentrates are suitable for dilution with water.

[0530] The active compound concentrations in the ready-to-use preparations can be varied within relatively wide ranges. In general, they are from 0.0001 to 10%, preferably from 0.01 to 1%.

[0531] If not otherwise specified, the solutions are prepared as follow:

[0532] The active ingredient is dissolved at the desired concentration in a mixture of 1:1 (vol/vol) distilled water:acteon. The test solution is prepared at the day of use.

[0533] Test solutions are prepared in general at concentrations of 1000 ppm, 500 ppm, 300 ppm, 100 ppm and 30 ppm (wt/vol).

[0534] The active compounds may also be used successfully in the ultra-low-volume process (ULV), by which it is possible to apply formulations comprising over 95% by weight of active compound, or even to apply the active compound without additives.

[0535] Various types of oils, wetters, adjuvants, may be added to the active compounds, if appropriate not until immediately prior to use (tank mix). These agents can be admixed with the agents according to the invention in a weight ratio of 1:100 to 100:1, preferably 1:10 to 10:1.

[0536] Suitable adjuvants in this sense are in particular: organically modified polysiloxanes, for example Break Thru S 240®; alcohol alkoxylates, for example Atplus 245®, Atplus MBA 1303®, Plurafac LF 300® and Lutensol ON 30®; EO/PO block polymers, for example Pluronic RPE 2035® and Genapol B®; alcohol ethoxylates, for example Lutensol XP 80®; and sodium dioctylsulfosuccinate, for example Leophen RA®.

[0537] In one embodiment, the method of the invention is directed to the transgenic plant according to table A, preferably A1 by increasing or generating the activity as depicted in table B, column 5, preferably a polypeptide as depicted in SEQ ID NO:1 to 270, preferably a polypeptide encoded by a nucleic acid molecule as depicted in table B, column 1 or 3 and the active ingredient (B) is selected from the group consisting of the groups B1, B2, B3, B4, B5, B6, B7, B8, B9, B10, B11, B12, B13, B14, B15, B16, B17, B18, B19, B20, B21, B22, B23, B24, B25, B26, B27, B28, B29, B30, B31, B32, B33, B34 and B35. The present examples illustrate the basic invention without being intended as limiting the subject of the invention.

[0538] The content of all of the references, patent applications, patents and published patent applications cited in the present patent application is herewith incorporated by reference.

### EXAMPLES

### Materials and Methods

### Engineering Productivity-Enhanced Corn Plants by Expressing EST163 Genes

[0539] Transformation of maize (Zea Mays L.) was performed using the construct NC027 (FIG. 1). Immature embryos were co-cultivated with Agrobacterium tumefaciens that carry “super binary” vectors, and transgenic plants were recovered through organo-genesis (Ishida et al., 1996, Nature Biotech 14745-50). This procedure provided a transformation efficiency of between 2.5% and 20%. The transgenic plants were then screened for improved plant biomass demonstrating that transgene expression confers productivity performance.

[0540] FIG. 1. Map of the construct NC027 of the gene of interest, EST163. The expression was driven by the promoter, ScBv, and AHAS was chosen as the selectable marker.

[0541] Agrobacterium cells harboring the genes and the maize ahas gene on the same plasmid were grown in YP medium supplemented with appropriate antibiotics for 1-3 days. A loop of Agrobacterium cells was collected and suspended in 2 ml M-LS-002 medium (LS-inf), and the tube containing Agrobactium cells was kept on a shaker for 1-3 hrs at 1,200 rpm.

[0542] Corncobs [genotype J553x (HIIIAxA188)] were harvested at 7-12 days after pollination. The cobs were sterilized in a 20% Clorox solution for 15 min followed by a thorough rinse with sterile water. Immature embryos between 0.8 and 2.0 mm in size were dissected into the tube containing Agrobacterium cells in LS-inf solution.

[0543] Agro-infection was carried out by keeping the tube horizontally in the laminar hood at room temperature for 30 min. Mixture of the agro infection was poured onto a plate containing the co-cultivation medium (M-LS-011). After the liquid agro-solution was piped out, the embryos were plated on the co-cultivation medium with scutellum side up and cultured in the dark at 22C for 2-4 days.

[0544] Embryos were transferred to M-MS-101 medium without selection. Seven to ten days later, the embryos were transferred to M-LS-401 medium containing 0.75 uM imazethapyr where they were grown for 4 weeks to select for transformed callus cells.

[0545] Plant regeneration was initiated by transferring resistant calli to M-LS-504 medium supplemented with 0.75 μM imazethapyr and grown under light at 26° C. for 2 to 3 weeks. Regenerated shoots were then transferred to a rooting box with M-MS-607 medium (0.5 μM imazethapyr).

[0546] Plantlets with roots were transferred to potting mixture and grown in a growth chamber for 1 week, then transplanted to larger pots and maintained in greenhouse until maturity. The seed was harvested, and the presence of the transgene was determined by resistance to imi herbicide or by the Taqman molecular analysis technique.

### Seed Treatments

[0547] J553x(HIIIAxA188) null and transgenic corn seeds of the T2 generation were treated with deionized water (Blank), 200 grams fipronil, 10 grams pyraclostrobin (F500), and 200 grams fipronil+10 grams pyraclostrobin; all formulation rates were grams/100 kg seed. Every formulation was applied to approximately 80 seeds. The formulation was pipetted into a 125 ml flask along the sides and bottom of the flask before adding the seeds and shaking the flask for 30 seconds. The coated seeds were then removed from the flask and placed in a plastic dish for drying.

Plant Management—WUE Study of Plants with the NC027 Construct

[0548] Transgene positive and negative corn seedlings for the transformation events, SDM-23881, SDM-23885, SDM-23889, SDM-23890, and SDM-23891 were transplanted into a pot 5-L pots. The pots were covered with lids that permit the seedlings to grow through but minimize water loss. Each pot was weighed periodically and water added to maintain the initial water content (50% full water capacity). At the end of the experiment, the fresh and dry weights of each plant were measured, the water consumed by each plant was determined, and WUE of each plant was computed. Plant growth and physiological traits such as WUE, height, fresh weight, and dry weight were measured during the experiment. A comparison was made for every phenotype between the transgene positive and negative plants.

### Plant Management—Fipronil/Pyraclostrobin Study

[0549] Seventy-five 3-L pots per treatment (Blank, fipronil, pyraclostrobin, and fipronil+pyraclostrobin) were filled with potting media, labeled with colored stakes, and given a unique barcode. One seed per pot was planted at a depth of approximately 2 cm and covered with media. The media was lightly watered to imbibe the seeds, while allowing for ample oxygen exchange and so that the chemical coatings on the seeds remained intact. After planting, the pots were randomly distributed into three replicate blocks (1 bench=1 block), each with 25 plants of every treatment.

[0550] The plants were maintained in a greenhouse under optimal, well-watered conditions (80-90% field capacity) upon emergence. Supplemental nutrients were administered every third day during watering. The greenhouse temperature was maintained at 30° C., relative humidity at 75%, and light at 350 μmol m⁻²s⁻¹, in a 15-hour day/9-hour night photoperiod. Supplemental lighting was provided using metal-halide lights. Once per week, the pots were randomly mixed within each block.

[0551] On day 21, the plants were imaged to collect the phenotypic data as described in the Imaging Procedures section. Leaves were sampled for transgene copy number on day 25 to identify the null and transgenic plants. On day 28, the plants were imaged and then harvested to collect fresh weight. The presence of the transgene was determined by the Taqman molecular analysis technique. Differences in the phenotypic data collected during the imaging process and in fresh weight among the four treatments and between the null and transgenic plants were assessed. The chemical by transgenic interactions were determined.

### Imaging Procedures

[0552] Imaging of the plants was facilitated using a LemnaTec Scanalyzer (Würselen, Germany), which includes a conveyor belt, an imaging station, a watering station, and computers for collecting, processing, and storing the image data. The cameras have a resolution of 1280×960 pixels and operate in 24-bit color.

[0553] The plants were manually transferred by block onto the conveyor system of the scanalyzer. Each plant was then moved through the imager automatically. At the imaging station, cameras collected the top view image and two side view images. The side view images were the transverse view and the view parallel with the plane of the plant.

[0554] As described in the formula (see Appendix A), the scanalyzer calculates plant volume as a number of pixels. To assign a physiologically meaningful value to the volume measurements, a separate experiment was conducted. The plants were scanned with the scanalyzer then harvested. The plant material was placed into a graduated cylinder filled to a known volume with water. The difference between the water plus plant material and water alone provided a known plant volume in mL. The number of LemnaTec calculated volume pixels divided by the number of mL per plant indicated that about 36,000 pixels is equivalent to 1 mL of plant volume.

[0555] Using the LemnaTec scanalyzer, we collected stem width; stalk volume; top, transverse, and parallel view plant areas; top, transverse, and parallel view green and yellow pixel counts; stem length; leaf angles and internode lengths through leaf 5; plant width and height; total leaf length; and total plant length.

### Results (Format of the Following Text Needs to be Corrected)

### Testing Enhancement of NC027

[0556] As shown in Table 1, the transgenic plants exhibited significant improvements in fresh weight (FW), dry weight, and plant volume. On average, fresh weight increased 6.5%, dry weight increased 7%, and plant volume increased 10.7%. All three were significant at 95% level of probability according to Analysis of Variance.

TABLE 1
Average percent change in growth between transgenic plants
and their null siblings for 5 NC027 events in two experiments.
Asterisks (*) indicate significance at 95%.

| | | | Lemnatec | Lemnatec | | |
|---|---|---|---|---|---|---|
| | | Lemnatec | Plant | Plant | Measured | Measured |
| Experiment | Event | FW | Volume | Length | FW | Dry Wt |
| 1 | SDM-23881 | 8.5 | 18.2 | −5.7* | 6.3 | 8.1 |
| 1 | SDM-23885 | 0.3 | −0.2 | −10.5* | 2.2 | 2.1 |
| 1 | SDM-23889 | −2.0 | −1.3 | 1.7 | 1.2 | 4.0 |
| 1 | SDM-23890 | 0.1 | 9.2 | 1.3 | 3.2 | 3.0 |
| 1 | SDM-23891 | 11.8* | 8.1 | 3.5 | 7.3 | 8.5* |
| 1 | Average | 5.2* | 10.7* | −2.0 | 6.5* | 7.0* |

### Testing Enhancement of Chemical Amendments to Trangenic Plants

[0557] In an initial trial, the phenotypes that showed treatment by genotype interactions at 95% significance included internode length and green vs. yellow plant material (Tables 2-5). At 80% significance, leaf angle and plant area were also included (Tables 6-7). fipronil enhanced greenness, internode length, leaf angle, and plant area relative to all other treatments. Other phenotypes showing significance for transgenic and treatment effects included fresh weight, plant and volume, number of fully expanded leaves, stem length, and View 3 size (Tables 8-10).

TABLE 2
Values for internode length in all treatments, measured in cm.
The single asterisk (*) indicates a significant treatment by geno-
type effect at 95%. Small letters indicate significant differences
between treatments at 95% confidence, and capital letters indicate
differences at 99%.

| | Internode 1* | | | | Internode 2 | | | | Internode 3 | | | |
|---|---|---|---|---|---|---|---|---|---|---|---|---|
| | Null | Trans | Avg | Test | Null | Trans | Avg | Test | Null | Trans | Avg | Test |
| Blank | 34.1 | 35.0 | 34.6 | a | 40.3 | 36.8 | 38.5 | a | 35.4 | 40.0 | 37.8 | a |
| F500 | 32.5 | 35.9 | 34.3 | ac | 36.0 | 40.4 | 38.4 | ac | 38.8 | 42.1 | 40.7 | ac |
| Fipronil | 35.3 | 36.6 | 35.9 | ac | 45.9 | 42.5 | 44.2 | BD | 42.4 | 37.7 | 40.0 | ac |
| Fipronil + F500 | 33.4 | 27.6 | 30.7 | BDE | 38.1 | 36.6 | 37.4 | acE | 32.6 | 32.7 | 32.6 | bDE |
| Average | 33.8 | 33.9 | 33.9 | | 40.1 | 39.2 | 39.7 | | 37.2 | 38.3 | 37.8 | |
| Test | a | a | | | a | a | | | a | a | | |

TABLE 3
Values for yellow, medium green, and dark green pixels
counts in all treatments in the parallel view. The single asterisk
(*) indicates a significant treatment by genotype effect at 95%.
Small letters indicate significant differences between treatments
at 95% confidence, and capital letters indicate differences at
99%.

| | Yellow Count* | | | | Medium Green Count | | | | Dark Green Count* | | | |
|---|---|---|---|---|---|---|---|---|---|---|---|---|
| | Null | Trans | Avg | Test | Null | Trans | Avg | Test | Null | Trans | Avg | Test |
| Blank | 1777.7 | 1956.1 | 1866.9 | A | 5648.8 | 5876.9 | 5762.8 | a | 16259.9 | 15850.4 | 16055.2 | a |
| F500 | 2006.6 | 2088.1 | 2051.9 | A | 5691.8 | 6522.1 | 6153.1 | a | 14727.7 | 15010.4 | 14884.7 | B |
| Fipronil | 1609.1 | 1806.0 | 1708.9 | Ac | 5470.9 | 5848.7 | 5662.4 | ac | 15955.0 | 16812.3 | 16389.5 | aC |
| Fipronil + F500 | 2496.2 | 3486.3 | 2970.9 | BCD | 6605.8 | 7106.0 | 6845.6 | BCD | 13381.2 | 11886.3 | 12664.5 | BCD |
| Average | 1981.7 | 2321.1 | 2154.9 | | 5872.6 | 6341.2 | 6111.8 | | 15049.9 | 14913.7 | 14980.4 | |
| Test | a | b | | | a | b | | | a | a | | |

TABLE 4
Values for yellow and medium green pixels counts in all treatments
in the transverse view. Small letters indicate significant
differences between treatments at 95% confidence, and capital
letters indicate differences at 99%.

| | Medium Green Count | | | | Yellow Count | | | |
|---|---|---|---|---|---|---|---|---|
| | Null | Trans | Avg | Test | Null | Trans | Avg | Test |
| Blank | 8861.5 | 9198.8 | 9030.2 | a | 3625.4 | 3837.4 | 3731.4 | a |
| F500 | 9303.7 | 9809.2 | 9584.5 | bc | 4081.7 | 4343.5 | 4227.2 | b |
| Fipronil | 9132.8 | 9046.4 | 9089.0 | ade | 3268.7 | 3455.9 | 3363.6 | aC |
| Fipronil + F500 | 9591.0 | 9251.6 | 9428.3 | ace | 4959.3 | 5865.9 | 5394.0 | BCD |
| Average | 9230.4 | 9340.1 | 9286.4 | | 4000.0 | 4365.7 | 4186.7 | |
| Test | a | a | | | a | b | | |

TABLE 5
Values for medium green pixels counts
in all treatments in the top view.

Medium Green Count

| | Null | Trans | Avg | Test |
|---|---|---|---|---|
| Blank | 17563 | 17866 | 17715 | a |
| F500 | 17893 | 19062 | 18542 | a |
| Fipronil | 17038 | 17881 | 17465 | ac |
| Fipronil + F500 | 19152 | 19720 | 19424 | Bd |
| Average | 17935 | 18642 | 18296 | |
| Test | a | a | | |

Small letters indicate significant differences between treatments at 95% confidence, and capital letters indicate differences at 99%.

TABLE 6
Values for leaf angle in all treatments, measured in degrees.
This phenotype was significant at 80% confidence. Small letters
indicate significant differences between treatments at 95%
confidence, and capital letters indicate differences at 99%.

| | Leaf Angle 0 | | | | Leaf Angle 1 | | | |
|---|---|---|---|---|---|---|---|---|
| | Null | Trans | Avg | Test | Null | Trans | Avg | Test |
| Blank | 62.7 | 69.6 | 66.2 | a | 51.3 | 33.6 | 42.4 | a |
| F500 | 39.2 | 52.5 | 46.6 | bc | 36.5 | 38.2 | 37.4 | ab |
| Fipronil | 57.5 | 68.7 | 63.2 | acd | 63.6 | 54.4 | 58.9 | acd |
| Fipronil + | 43.9 | 36.6 | 40.5 | BcE | 47.8 | 16.8 | 33.2 | abE |
| F500 | | | | | | | | |
| Average | 50.8 | 56.9 | 53.9 | | 50.1 | 36.2 | 43.0 | |
| Test | a | a | | | a | b | | |

TABLE 7
Values for plant area in the parallel view
in all treatments, measured in pixels.

Plant Area

| | Null | Trans | Avg | Test |
|---|---|---|---|---|
| Blank | 23686.4 | 23683.3 | 23684.8 | a |
| F500 | 22426.2 | 23620.6 | 23089.7 | a |
| Fipronil | 23035.0 | 24467.0 | 23760.8 | ac |
| Fipronil + F500 | 22483.1 | 22478.7 | 22481.0 | Bd |
| Average | 22904.2 | 23576.0 | 23247.1 | |
| Test | a | b | | |

This phenotype was significant at 80% confidence. Small letters indicate significant differences between treatments at 95% confidence, and capital letters indicate differences at 99%.

TABLE 8
Values for whole plant phenotypes in all treatments. Fresh
weight was hand-collected and measured in grams. Plant height
was LemnaTec calculated and measured in cm. Plant volume
was measured in pixels. Small letters indicate significant differences
between treatments at 95% confidence, and capital letters
indicate differences at 99%.

| | Fresh Weight | | | | Plant Height | | | | Plant Volume | | | |
|---|---|---|---|---|---|---|---|---|---|---|---|---|
| | Null | Trans | Avg | Test | Null | Trans | Avg | Test | Null | Trans | Avg | Test |
| Blank | 162.9 | 155.2 | 159.0 | a | 477.4 | 479.4 | 478.4 | a | 6.58E+06 | 6.60E+06 | 6.59E+06 | a |
| F500 | 155.7 | 155.0 | 155.3 | ac | 469.9 | 481.7 | 476.5 | a | 6.18E+06 | 6.63E+06 | 6.43E+06 | a |
| Fipronil | 160.9 | 164.7 | 162.8 | ace | 478.7 | 486.1 | 482.5 | a | 6.53E+06 | 6.86E+06 | 6.70E+06 | ac |
| Fipronil + F500 | 144.0 | 152.8 | 148.2 | BdF | 478.3 | 481.1 | 479.7 | a | 6.19E+06 | 6.10E+06 | 6.15E+06 | BD |
| Average | 155.6 | 157.0 | 156.3 | | 476.3 | 482.2 | 479.3 | | 6.37E+06 | 6.55E+06 | 6.46E+06 | |
| Test | a | a | | | a | b | | | a | a | | |

TABLE 9
Values for leaf number and stem length in all treatments.
Stem length was measured in cm. Small letters indicate significant
differences between treatments at 95% confidence, and
capital letters indicate differences at 99%.

| | # Fully | | | | | | | |
|---|---|---|---|---|---|---|---|---|
| | Expanded Leaves | | | | Stem Length | | | |
| | Null | Trans | Avg | Test | Null | Trans | Avg | Test |
| Blank | 3.2 | 3.4 | 3.3 | a | 107.3 | 117.6 | 112.5 | a |
| F500 | 2.9 | 3.1 | 3.0 | a | 97.2 | 110.2 | 104.4 | ac |
| Fipronil | 3.1 | 3.0 | 3.0 | a | 110.4 | 107.1 | 108.8 | ac |
| Fipronil + | 2.9 | 2.5 | 2.7 | B | 86.7 | 77.4 | 82.2 | BD |
| F500 | | | | | | | | |
| Average | 3.0 | 3.0 | 3.0 | | 100.2 | 103.3 | 101.8 | |
| Test | a | a | | | a | a | | |

TABLE 10
Values for stalk area from the transverse view.

Pixel Count

| | Null | Trans | Avg | Test |
|---|---|---|---|---|
| Blank | 4881 | 5138 | 5010 | a |
| F500 | 4725 | 4723 | 4724 | ac |
| Fipronil | 5081 | 4744 | 4910 | ac |
| Fipronil + F500 | 4375 | 4196 | 4289 | BdE |
| Average | 4760 | 4699 | 4729 | |
| Test | a | a | | |

Small letters indicate significant differences between treatments at 95% confidence, and capital letters indicate differences at 99%.

[0558] Longer internode length may have represented better plant growth. A higher percentage of green pixels per plant area implies that the plant had greater photosynthetic capacity. Similarly, when the preponderance of yellow pixels may have indicated that the plant was experiencing some measure of stress causing chlorosis.

[0559] Larger leaf angles implies that leaves were laying flatter and thus received more photosynthetic radiation, and larger plant area suggests that there was more leaf surface area for photosynthesis.

[0560] In general, fipronil enhanced fresh mass, plant volume, plant height, and plant width as well.

[0561] The effect of chemical amendments was enhanced when applied to transgenic plants indicating a significant chemical by transgene interaction, as exemplified by the effects on internode length and changes in leaf angle.

| Variable | Interaction | SS | MS | FValue | ProbF |
|---|---|---|---|---|---|
| Internode | treatment * Copy_Call | 1805.79 | 601.9298 | 3.56 | 0.0142 |
| Sideview-yellow | treatment * Copy_Call | 13579567 | 4526522 | 2.81 | 0.0389 |
| Sideview-darkgreen_{—} | treatment * Copy_Call | 96292593 | 32097531 | 2.6 | 0.0516 |

[0562] In a second trial, the phenotypes that showed treatment by genotype interactions at 95% significance included plant volume, calculated fresh weight, side plant area, and dark green pixel count (Table 11). Plant volume and dark green pixel count were significant at 99% for the pyraclostrobin treatment. In general, pyraclostrobin enhanced plant size and photosynthetic health. The effect of chemical amendments was enhanced when applied to transgenic plants indicating a significant chemical by transgene interaction.

[0563] Increases in plant volume, fresh weight, and plant area show an enhancement of plant growth. A higher percentage of green pixels per plant area may imply increased photosynthetic capacity. Similarly, a preponderance of yellow pixels indicates some measure of stress, causing chlorosis.

[0564] A larger plant area suggests that more leaf surface area is available for photosynthesis.

[0565] Results from both days 21 and 28 followed the same trends.

TABLE 11
Values for plant volume, fresh weight, and plant
greenness. Small letters indicate significant differences between
treatments at 95% confidence, and capital letters indicate
differences at 99%.

| | Plant Volume (M pixels) | | | | Calc Fresh Weight (g) | | | | Broad Side Plnt Area (pixels) | | | |
|---|---|---|---|---|---|---|---|---|---|---|---|---|
| Treatment | Null | Trans | Avg | Test | Null | Trans | Avg | Test | Null | Trans | Avg | Test |
| Blank | 7.26 | 9.43 | 8.36 | a | 83.28 | 101.45 | 92.37 | a | 29782.18 | 34714.96 | 32248.57 | a |
| Control | 8.42 | 8.65 | 8.53 | ac | 99.33 | 94.37 | 96.85 | ac | 32106.05 | 31843.49 | 31974.77 | ac |
| F500 | 9.90 | 11.04 | 10.47 | Bde | 100.53 | 110.41 | 105.47 | bcd | 36740.30 | 39599.17 | 38169.74 | bde |
| Fip + F500 | 9.56 | 9.94 | 9.75 | acef | 99.33 | 105.42 | 102.38 | acde | 37117.46 | 37053.24 | 37085.35 | adef |
| Fipronil | 8.89 | 9.50 | 9.19 | acef | 99.88 | 101.65 | 100.77 | acde | 36398.18 | 34428.06 | 35413.12 | acef |
| Average | 8.82 | 9.68 | 9.25 | | 96.22 | 102.41 | 99.31 | | 34443.87 | 35397.68 | 34920.78 | |
| Test | a | a | | | a | a | | | a | a | | |

| | Top Drk Grn (pixels) | | | | Broad Side Drk Grn (pixels) | | | | Narrow Side Drk Grn (pix) | | | |
|---|---|---|---|---|---|---|---|---|---|---|---|---|
| Treatment | Null | Trans | Avg | Test | Null | Trans | Avg | Test | Null | Trans | Avg | Test |
| Blank | 50195.35 | 55954.94 | 53075.14 | a | 26741.88 | 23051.09 | 21896.48 | a | 21683.49 | 25317.00 | 23460.24 | a |
| Control | 58874.73 | 56391.61 | 57633.17 | ac | 22733.68 | 21788.39 | 22261.04 | ac | 26482.95 | 25010.75 | 25746.85 | ac |
| F500 | 57676.78 | 62307.07 | 59991.92 | Bcd | 26088.87 | 27881.04 | 26984.96 | Bde | 26394.93 | 28392.28 | 27393.61 | bcd |
| Fip + F500 | 56384.17 | 56031.02 | 56207.60 | acde | 26769.63 | 26003.90 | 26386.77 | bdef | 26203.26 | 27419.26 | 26811.26 | acde |
| Fipronil | 56608.71 | 57655.69 | 57132.20 | acde | 26176.97 | 23958.33 | 25067.65 | acef | 24703.55 | 27235.14 | 25969.34 | acde |
| Average | 55800.19 | 57661.27 | 56730.73 | | 24512.31 | 24435.34 | 24473.82 | | 25053.73 | 26633.30 | 25843.52 | |
| Test | a | a | | | a | a | | | a | a | | |

| Variable | Interaction | SS | MS | FValue | ProbF |
|---|---|---|---|---|---|
| Internode | treatment*Copy_Call | 1805.79 | 601.9298 | 3.56 | 0.0142 |
| Sideview-yellow | treatment*Copy_Call | 13579567 | 4526522 | 2.81 | 0.0389 |
| Sideview-darkgreen_{—} | treatment*Copy_Call | 96292593 | 32097531 | 2.6 | 0.0516 |

### CONCLUSIONS

[0566] Chemical amendments enhance plant performance of transgenic and non-transgenic plants through manipulation of whole plant architecture and size, leaf color, and leaf morphology, among others. Administering combinations of chemical amendments carefully with transgenic plants may stimulate an even greater effect. The benefits will include greater plant performance in stress conditions, whether biotic or abiotic in nature, leading to increased yield and economic benefit.

### APPENDIX A

[0567] Dry Weight—A measurement of the dry weight of the plant in grams. After harvest, the plants are placed into a drying oven set at 65° C., dried for a minimum of 72 hours, then weighed.

[0568] Fresh Weight—A measurement of the fresh weight of the plant in grams. Hand-collected fresh weight is measured by harvesting the plant and weighing it on a balance. LemnaTec fresh weight is calculated by the scanalyzer based on plant volume and plant age. The zoom angles of the camera lenses are normalized using a calibration table.

[0569] Internode length—Internode length is measured from leaf collar to leaf collar up the stem. Internode 1, for example, is measured from Leaf 0 to Leaf 1. Reported in cm.

[0570] Leaf Angle—A measurement of the angle of the leaf. The vectors for the angle are from the base of the leaf horizontally to the leaf tip and vertically up the plant stalk. The measured angle is from the stalk above the leaf to the leaf tip, reported in degrees.

[0571] Number of Fully Expanded Leaves—A count of the number of leaves with a recognizable leaf collar.

[0572] Parallel View Plant Area—A count of the total number of pixels of the plant as imaged from the parallel side.

[0573] Parallel View Dark Green Pixels—A count of the total number of user-defined dark green pixels as imaged from the parallel side. Indicates photosynthetic health of the plant.

[0574] Parallel View Medium Green Pixels—A count of the total number of user-defined dark green pixels as imaged from the parallel side. Indicates initial onset of chlorosis in the plant.

[0575] Parallel View Yellow Pixels—A count of the total number of user-defined yellow pixels as imaged from the parallel side. Indicates chlorosis in the plant.

[0576] Plant Height—A measurement from the base of the stem to the collar of the last fully expanded leaf, reported in cm.

[0577] Plant Volume—Calculated from the pixel counts of the three images and reported in pixels according to the formula:

Volume=(top view×transverse view×parallel view pixels)^{0.5}

[0578] Plant Width—A measurement of the breadth of the plant from left-most leaf tip to right-most leaf tip.

[0579] Stalk Volume—Measured from the base of the plant to the last expanded leaf. Incorporates the pixel counts from the transverse and parallel view images, reported in pixels.

[0580] Stem Length—A measurement of the stem length from the base of the plant to the last fully expanded leaf, reported in cm.

[0581] Stem Width—A measurement of the stem at the base of the plant in the transverse view, reported in mm.

[0582] Top View Plant Area—A count of the total number of pixels of the plant as imaged from above.

[0583] Top View Dark Green Pixels—A count of the total number of user-defined dark green pixels as imaged from above. Indicates photosynthetic health of the plant.

[0584] Top View Medium Green Pixels—A count of the total number of user-defined dark green pixels as imaged from the parallel side. Indicates initial onset of chlorosis in the plant.

[0585] Top View Yellow Pixels—A count of the total number of user-defined yellow pixels as imaged from above. Indicates chlorosis in the plant.

[0586] Total Leaf Length—A sum of all leaves as measured from the base to the tip of each leaf, reported in cm.

[0587] Total Plant Length—A measurement from the base of the stem to the tip of the high-est most leaf, reported in cm.

[0588] Transverse View Plant Area—A count of the total number of pixels of the plant as imaged from the transverse side.

[0589] Transverse View Dark Green Pixels—A count of the total number of user-defined dark green pixels as imaged from the transverse side. Indicates photosynthetic health of the plant.

[0590] Transverse View Medium Green Pixels—A count of the total number of user-defined dark green pixels as imaged from the parallel side. Indicates initial onset of chlorosis in the plant.

[0591] Transverse View Yellow Pixels—A count of the total number of user-defined yellow pixels as imaged from the transverse side. Indicates chlorosis in the plant.

[0592] Transverse View Stalk Area—A count of the total number of pixels of the stalk from the transverse view.

[0593] Those of ordinary skill in the art will recognize, or will be able to ascertain using no more than routine experimentation, many equivalents to the specific embodiments of the invention described herein. Such equivalents are intended to be encompassed by the following claims.

TABLE B

| | Column | | | | |
|---|---|---|---|---|---|
| | | | 3 | | |
| | | | SEQ | | |
| | | | ID | | |
| | 1 | | NO. | | |
| | Gene | 2 | in the | | |
| | Name/ | Publication | resp. | 4 | 5 |
| Line | Locus ID | No | publication | Source organism | Gene Annotation/Function/Activity |
| 1. | ATACCD | WO2007 | 2 | Arabidopsis | ATACCD |
| | | 011625 | | thaliana | |
| 2. | ATAGR1 | WO2007 | 2 | Arabidopsis | ATAGR1 |
| | | 011771 | | thaliana | |
| 3. | ATHLS | WO2007 | 2, 6 | Arabidopsis | N-ACETYL TRANSFERASE |
| | | 011681 | | thaliana | PROTEIN FROM ARABIDOPSIS |
| | | | | | THALIANA |
| 4. | ATSHMT4 | US2006/ | 2 | Arabidopsis | GLYCINE HYDROXYMETHYL |
| | | 027384 | | thaliana | TRANSFERASE |
| 5. | ATSTE24 | WO2002/ | 3, 4 | Arabidopsis | ARABIDOPSIS THALIANA PRENYLPEPTIDASE |
| | | 16625 | | thaliana | |
| 6. | b2699 | WO2007 | 159 | E. coli | (0/1061) DNA STRAND EXCHANGE, |
| | | 020198 | | | RENATURATION |
| 7. | b2965 | WO2006 | 797, | E. coli | ORNITHINE DECARBOXYLASE |
| | | 069610 | 91636 | | |
| 8. | BN45412825 | WO2004/ | 517 | Brassica napus | RHO1PS HOMOLOG/RAC-LIKE |
| | | 092398 | | | PROTEIN |
| 9. | BN51473779 | WO2004/ | | Brassica napus | ASPARTYLAMINO PEPTIDASE |
| | | 092398 | | | |
| 10. | B0730 | WO2006/ | 34229, | E. coli | TRANSCRIPTION REGULATOR |
| | | 069610 | 29163, | | |
| | | | 24084, | | |
| | | | 4465, | | |
| | | | 17105, | | |
| | | | 22610, | | |
| | | | 19785, | | |
| | | | 418, | | |
| | | | 2049 | | |
| 11. | b1830 | WO2004/ | 259, | E. coli | CARBOXY-TERMINALPROTEASE |
| | | 092398 | 260 | | FOR PENICILLIN-BINDING PROTEIN3 |
| 12. | b2664 | WO2004/ | 263, | E. coli | PUTATIVE TRANSCRIPTIONAL |
| | | 092398 | 264 | | REGULATOR |
| 13. | b2082 | WO2004/ | 253, | E. coli | PROPHAGE P2OGR PROTEIN |
| | | 092398 | 254 | | |
| 14. | b2799 | WO2004/ | 265, | E. coli | L-1 |
| | | 092398 | 266 | | |
| 15. | b2148 | WO2004/ | 249, | E. coli | METHYL-GALACTOSIDE TRANSPORT, |
| | | 092398 | 250 | | GALACTOSETAXIS |
| 16. | b2796 | WO2004/ | 251, | E. coli | PROBABLE SERINE TRANSPORTER |
| | | 092398 | 252 | | |
| 17. | b3116 | WO2006 | 258 | E.coli | ANAEROBICALLY INDUCIBLE L- |
| | | 069610 | | | THREONINE |
| 18. | b0124 | WO2004/ | 255, | E. coli | GLUCOSE DEHYDROGENASE |
| | | 092398 | 256 | | |
| 19. | EST102 | US20070028333 | 016, | Physcomitrella | |
| | | | 5, 6 | patens | |
| 20. | EST12 | US20070157343 | 883, | Physcomitrella | |
| | | | 11, | patens | |
| | | | 18 | | |
| 21. | EST134 | US20070261131 | 688, | Physcomitrella | |
| | | | 5, 8 | patens | |
| 22. | PpPK_EST142 | U.S. Pat. No. 7,176,026 | 176, | | |
| | | | 026, | | |
| | | | 5, 6 | | |
| 23. | PpAPS_EST163 | US20070192908 | 282, | Physcomitrella | TRANSCRIPTION FACTOR |
| | | | 9, 17 | patens | |
| 24. | PpGBP- | US2004/ | 6, 11 | Physcomitrella | SMALL GTP-BINDING PROTEIN |
| | 1_EST203 | 0194163 | | patens | SAR1BNT |
| 25. | EST217 | US20070157344 | 246, | Physcomitrella | |
| | | | 8, 13 | patens | |
| 26. | EST255 | U.S. Pat. No. 6,677,504 | 677, | | |
| | | | 504, | | |
| | | | 10, | | |
| | | | 18 | | |
| 27. | EST266 | U.S. Pat. No. 7,166,767 | 166, | | |
| | | | 767, | | |
| | | | 6, 11 | | |
| 28. | EST268 | WO2006 | 8, | | |
| | | 133983 | 477, | | |
| | | | 7, 12 | | |
| 29. | PpCK- | WO2006 | 105, | | |
| | 3_EST289 | 020717 | 723, | | |
| | | | 11, | | |
| | | | 12 | | |
| 30. | EST293 | US20070157334 | 902, | Physcomitrella | |
| | | | 20, | patens | |
| | | | 33 | | |
| 31. | EST295 | WO2003 | 12 | Physcomitrella- | LEUCINE-RICH REPEAT TRANSMEMBRANE |
| | | 040171 | | patens | PROTEIN KINASE1 |
| 32. | PpZF_EST307 | US2004/ | 12, | Physcomitrella | ZINC-FINGER PROTEIN |
| | | 0107463 | 20 | patens | |
| 33. | EST335 | US2004/ | 5, 8 | Physcomitrella | PUTATIVE CDC21 PROTEIN |
| | | 0128721 | | patens | |
| 34. | PpSCL_EST386 | WO2006/ | 1, 2 | Physcomitrella | SCARE CROW-LIKE TRANSCRIPTION |
| | | 044912 | | patens | FACTOR 14 (SCL14) |
| 35. | PpCBF_EST39 | U.S. Pat. No. 7,164,057 | 164, | | |
| | | | 057, | | |
| | | | 10, | | |
| | | | 17 | | |
| 36. | EST391 | US20070079400 | 646, | Physcomitrella | |
| | | | 129, | patens | |
| | | | 130 | | |
| 37. | EST4 | U.S. Pat. No. 7,091,402 | 091, | | |
| | | | 402, | | |
| | | | 2, 3 | | |
| 38. | pPP2A- | WO2002 | 8, 13 | Physcomitrella | TYPE 2A PROTEIN PHOSPHATASE-1 |
| | 4_EST430 | 46442 | | patens | |
| 39. | EST443 | US20070157345 | 353, | Physcomitrella | |
| | | | 8, 9 | patens | |
| 40. | EST46 | U.S. Pat. No. 7,125,719 | 125, | | |
| | | | 719, | | |
| | | | 5, 6 | | |
| 41. | EST472 | US20040148658 | 750, | Physcomitrella | |
| | | | 1, 2 | patens | |
| 42. | EST512 | WO2006/ | 5, 6 | Physcomitrella | PHYTOCHROME ASIGNAL |
| | | 044912 | | patens | TRANSDUCTION1 (PAT1) |
| 43. | PpVTP_EST513 | WO2006/ | 1, 2 | Physcomitrella | RAB1C |
| | | 050038 | | patens | |
| 44. | PpLLPK_EST557 | WO2006 | 2. | Physcomitrella | PUTATIVE LECTIN-LIKE PROTEIN |
| | | 134162 | | patens | KINASE |
| 45. | EST65 | US2003/ | 11, | Physcomitrella | TRANSCRIPTIONAL REGULATOR |
| | | 0172408 | 12 | patens | |
| 46. | GM52570278 | WO2006 | 968 | Glycine max | VESICLE TRANSPORT V-SNARE |
| | | 032708 | | | PROTEIN |
| 47. | GM59556757 | WO2006/ | 7, 8 | Glycine max | (124/2079) SCARE CROW-LIKE |
| | | 044912 | | | TRANSCRIPTION FACTOR8 |
| | | | | | (SCL8) |
| 48. | GM59587863 | WO2006 | 834 | Glycine max | PUTATIVE PROTEIN KINASE |
| | | 032708 | | | |
| 49. | GM59594319 | WO2003 | 18, 20, | Glycine max | (186/1106) TYPE2A PROTEIN PHOSPHATASE-1 |
| | | 020914 | 22 | | |
| 50. | GM59629961 | WO2006 | 914 | Glycine max | PUTATIVE CASEINKINASEI |
| | | 032708 | | | |
| 51. | At3g24570 | WO2004 | 2 | Arabidopsis | ARABIDOPSIS THALIANA |
| | | 074440 | | thaliana | AT3G24570 PROTEIN |
| 52. | YDR071C | WO2004/ | 289, | Saccharomyces | POLYAMINE ACETYL TRANSFERASE |
| | | 092398 | 290 | cerevisiae | |
| 53. | YGL239c | WO2004/ | 7, 8 | Saccharomyces | HYPOTHETICAL PROTEIN |
| | | 092398 | | cerevisiae | |
| 54. | YBR288C | WO2004/ | 59, | Saccharomyces | MU3-LIKE SUBUNIT OF THE |
| | | 092398 | 60 | cerevisiae | CLATHRIN ASSOCIATED PROTEIN |
| | | | | | COMPLEX (AP-3) |
| 55. | YBR258C | WO2004/ | 61, | Saccharomyces | SUBUNIT OF THE COMPASS |
| | | 092398 | 62 | cerevisiae | (SET1C) COMPLEX |
| 56. | YCL001w-a | US2004/ | 63, | Saccharomyces | DOM34 PROTEIN HOMOLOG |
| | | 011888 | 64 | cerevisiae | |
| 57. | YBR274w | WO2004/ | 65, | Saccharomyces | DNA DAMAGE CHECKPOINT EFFECTOR |
| | | 092398 | 66 | cerevisiae | KINASE |
| 58. | YCL027w | WO2004/ | 273, | Saccharomyces | CELL FUSION PROTEIN |
| | | 092398 | 274 | cerevisiae | |
| 59. | YBL060w | WO2004/ | 9, 10 | Saccharomyces | HYPOTHETICAL PROTEIN |
| | | 092398 | | cerevisiae | |
| 60. | YHR090c | WO2004/ | 67, | Saccharomyces | SUBUNIT OF THE NUA4 HISTONE |
| | | 092398 | 68 | cerevisiae | ACETYLTRANSFERASE |
| | | | | | COMPLEX THAT ACETYLATES |
| | | | | | HISTONE H4, H2A; HAS SIMILARITY |
| | | | | | TO THE HUMAN TUMOR |
| | | | | | SUPPRESSORING1 |
| 61. | YGR121c | WO2004/ | 69, | Saccharomyces | AMMONIUM TRANSPORT PROTEIN |
| | | 092398 | 70 | cerevisiae | MEP1 |
| 62. | YGR127w | WO2004/ | 71, | Saccharomyces | HYPOTHETICAL PROTEIN |
| | | 092398 | 72 | cerevisiae | |
| 63. | YGR161c | WO2004/ | 287, | Saccharomyces | PROTEIN PHOSPHATASE TYPE2A |
| | | 092398 | 288 | cerevisiae | PE2A |
| 64. | YKL051w | WO2004/ | 77, | Saccharomyces | PLASMA MEMBRANE PROTEIN |
| | | 092398 | 78 | cerevisiae | THAT MAY ACT TO GET HER |
| | | | | | WITH OR UPSTREAM OF STT4P |
| | | | | | TO GENERATE NORMAL LEVEL |
| | | | | | SOFTHE ESSENTIAL PHOSPHOLIPID |
| | | | | | PI4P |
| 65. | YKL103C | WO2004/ | 283, | Saccharomyces | AMINOPEPTIDASE YSCI |
| | | 092398 | 284 | cerevisiae | |
| 66. | YKL017c | WO2004/ | 83, | Saccharomyces | DNA HELICASE1; HCS1P |
| | | 092398 | 84 | cerevisiae | |
| 67. | YKL132c | WO2004/ | 87, | Saccharomyces | SIMILAR TO FOLYL- |
| | | 092398 | 88 | cerevisiae | POLYGLUTAMATE SYNTHASE |
| | | | | | RMA1P |
| 68. | YGR126 | WO2004/ | 89, | Saccharomyces | PUTATIVE PROTEIN OF UN- |
| | w | 092398 | 90 | cerevisiae | KNOWN FUNCTION |
| 69. | YKL058w | WO2004/ | 93, | Saccharomyces | TOA2TFIIA SUBUNIT (TRANSCRIPTION |
| | | 092398 | 94 | cerevisiae | INITIATION FACTOR) |
| 70. | YIL023c | WO2004/ | 243, | Saccharomyces | YEAST KE4 |
| | | 092398 | 244 | cerevisiae | |
| 71. | YHR195w | WO2004/ | 99, | Saccharomyces | NUCLEAR ENVELOPE PROTEIN |
| | | 092398 | 100 | cerevisiae | THAT INTERACTS WITH THE |
| | | | | | VACUOLAR MEMBRANE PROTEIN |
| | | | | | VAC8P TO PROMOTE |
| | | | | | FORMATION OF NUCLEUS- |
| | | | | | VACUOLE JUNCTIONS DURING |
| | | | | | PIECEMEAL MICRO AUTO- |
| | | | | | PHAGY OF THE NUCLEUS |
| 72. | YIR022w | WO2004/ | 101, | Saccharomyces | SIGNAL PEPTIDASE SUBUNIT |
| | | 092398 | 102 | cerevisiae | SEC11P |
| 73. | YJL172w | WO2004/ | 105, | Saccharomyces | VACUOLAR CARBOXYPEPTIDASE |
| | | 092398 | 106 | cerevisiae | YSCS |
| 74. | YHR113W | WO2004/ | 107, | Saccharomyces | CYTOPLASMIC ASPARTYLAMINO |
| | | 092398 | 108 | cerevisiae | PEPTIDASE] |
| 75. | YGR141w | WO2006 | 84 | Saccharomyces | VACUOLAR PROTEIN SORTING |
| | | 032708 | | cerevisiae | (VPS) PROTEIN REQUIRED FOR |
| | | | | | CYTOPLASM TO VACUOLE |
| | | | | | TARGETING OF PROTEINS |
| 76. | YHR175w | WO2004/ | 109, | Saccharomyces | PUTATIVE LOW-AFFINITY COPPER |
| | | 092398 | 110 | cerevisiae | TRANSPORTER OF THE |
| | | | | | VACUOLAR MEMBRANE |
| 77. | YGR212w | WO2004/ | 111, | Saccharomyces | N-ACETYLTRANSFERASE |
| | | 092398 | 112 | cerevisiae | |
| 78. | YGR180c | WO2004/ | 115, | Saccharomyces | RNR4 RIBONUCLEOTIDE REDUCTASE |
| | | 092398 | 116 | cerevisiae | |
| 79. | YJL179W | WO2004/ | 117, | Saccharomyces | PREFOLDIN SUBUNIT1; PUTATIVE |
| | | 092398 | 118 | cerevisiae | HOMOLOG OF SUBUNIT 1 |
| | | | | | OF BOVINE PREFOLDIN |
| 80. | YJL001W | WO2004/ | 119, | Saccharomyces | 20S PROTEASOME BETA-TYPE |
| | | 092398 | 120 | cerevisiae | SUBUNIT |
| 81. | YJL208c | WO2004/ | 121, | Saccharomyces | NUC1_YEAST MITOCHONDRIAL |
| | | 092398 | 122 | cerevisiae | NUCLEASE |
| 82. | YJL152W | WO2004/ | 123, | Saccharomyces | HYPOTHETICAL PROTEIN |
| | | 092398 | 124 | cerevisiae | |
| 83. | YGL166w | WO2004/ | 11, | Saccharomyces | CUP2 COPPER-DEPENDENT |
| | | 092398 | 12 | cerevisiae | TRANSCRIPTION FACTOR |
| 84. | YJL151c | WO2004/ | 127, | Saccharomyces | SNA3 INTEGRAL MEMBRANE |
| | | 092398 | 128 | cerevisiae | PROTEIN LOCALIZED TO |
| | | | | | VACUOLAR INTRALUMENAL |
| | | | | | VESICLE |
| 85. | YLR441c | WO2004/ | 129, | Saccharomyces | RPS1A RIBOSOMALPROTEIN |
| | | 092398 | 130 | | S3A.E |
| 86. | YLR029C | WO2004/ | 135, | Saccharomyces | PROTEIN COMPONENT OF THE |
| | | 092398 | 136 | cerevisiae | LARGE(60S) RIBOSOMAL SUB- |
| | | | | | UNIT |
| 87. | YFR042W | WO2004/ | 279, | Saccharomyces | PUTATIVE PROTEIN OF UN- |
| | | 092398 | 280 | cerevisiae | KNOWN FUNCTION |
| 88. | YLR210w | WO2006 | | Saccharomyces | B-TYPE CYCLIN INVOLVED IN |
| | | 032708 | | cerevisiae | CELLCYCLE PROGRESSION |
| 89. | YLR173w | WO2006 | | Saccharomyces | HYPOTHETICAL PROTEIN |
| | | 032708 | | cerevisiae | |
| 90. | YLL041c | WO2004/ | 137, | Saccharomyces | IRON-SULFUR PROTEIN SUB- |
| | | 092398 | 138 | cerevisiae | UNIT OF SUCCINATE DEHYDROGENASE |
| | | | | | (SDH1P |
| 91. | YKL150w | WO2006 | | Saccharomyces | MCR1 CYTOCHROME-B5 REDUCTASE |
| | | 032708 | | cerevisiae | |
| 92. | YLR105c | WO2004/ | 139, | Saccharomyces | SUBUNIT OF THE TRNASPLICING |
| | | 092398 | 140 | cerevisiae | ENDONUCLEASE |
| 93. | YIL136w | WO2004/ | 141, | Saccharomyces | OM45 PROTEIN OF THE OUTER |
| | | 092398 | 142 | cerevisiae | MITOCHONDRIAL MEMBRANE |
| 94. | YLR224W | WO2004/ | 223, | Saccharomyces | F-BOX PROTEIN, COMPONENT |
| | | 092398 | 224 | cerevisiae | OF SCF UBIQUITIN LIGASE COMPLEXES |
| | | | | | INVOLVED INUBIQUIT INDEPENDENT |
| | | | | | PROTEIN CATABOLISM; |
| | | | | | READILY MONO UBIQUITINATED |
| | | | | | INVITRO BY SCF-UBC4 |
| | | | | | COMPLEXES |
| 95. | YGL106W | WO2004/ | 239, | Saccharomyces | ESSENTIAL LIGHT CHAIN FOR- |
| | | 092398 | 240 | cerevisiae | MYOSIN MYO2P; MAY STABILIZE |
| | | | | | MYO2P BY BINDING TO THE |
| | | | | | NECK REGION; MAY INTERACT |
| | | | | | WITH MYO1P |
| 96. | YLR215c | WO2004/ | 143, | Saccharomyces | PROTEIN INVOLVED IN NUTRITIONAL |
| | | 092398 | 144 | cerevisiae | CONTROL OF THE |
| | | | | | CELLCYCLE; REGULATES |
| | | | | | ABUNDANCE OF THE TRANSLATION |
| | | | | | INITIATION FACTOR EIF2; |
| | | | | | ORTHOLOG OF HUMAN D123 |
| | | | | | PROTEIN |
| 97. | YLR274w | WO2006 | | Saccharomyces | COMPONENT OF THE |
| | | 032708 | | cerevisiae | HEXAMERIC MCM COMPLEX |
| 98. | YMR260C | WO2004/ | 147, | Saccharomyces | TRANSLATION INITIATION FACTOR |
| | | 092398 | 148 | cerevisiae | EIF1A |
| 99. | YNL120C | WO2004/ | 149, | Saccharomyces | DUBIOUS OPEN READING FRAME |
| | | 092398 | 150 | cerevisiae | UNLIKELY TO ENCODE A PROTEIN |
| 100. | YMR154c | WO2004/ | 227, | Saccharomyces | CALPAIN-LIKE PROTEASE INVOLVED |
| | | 092398 | 228 | cerevisiae | IN PROTEOLYTIC ACTIVATION |
| | | | | | OF RIM101P IN RESPONSE |
| | | | | | TO ALKALINE PH |
| 101. | YNL090W | WO2004/ | 285, | Saccharomyces | NON-ESSENTIAL SMALL |
| | | 092398 | 286 | cerevisiae | GTPASE OF THE RHO/RAC SUB- |
| | | | | | FAMILY OF RAS-LIKE PROTEINS |
| 102. | YNL108c | WO2006 | | Saccharomyces | PROTEIN OF UNKNOWN FUNCTION |
| | | 032708 | | cerevisiae | LOCALISED TO CYTOPLASM, |
| | | | | | NUCLEUS |
| 103. | YNL141w | WO2006 | | Saccharomyces | AAH1 ADENOSINE DEAMINASE |
| | | 032708 | | cerevisiae | |
| 104. | YLR407W | WO2004/ | 151, | Saccharomyces | PUTATIVE PROTEIN OF UN- |
| | | 092398 | 152 | cerevisiae | KNOWN FUNCTION |
| 105. | YNL079C | WO2004/ | 277, | Saccharomyces | TPM1TROPOMYOSIN1 |
| | | 092398 | 278 | cerevisiae | |
| 106. | YMR197c | WO2004/ | 154 | Saccharomyces | PROTEIN INVOLVED IN CIS- |
| | | 092398 | | cerevisiae | GOLGI MEMBRANE TRAFFIC; V- |
| | | | | | SNARE THAT INTERACTS WITHTWOT- |
| | | | | | SNARES |
| 107. | YMR100W | WO2004/ | 155, | Saccharomyces | PROTEIN OF UNKNOWN FUNCTION |
| | | 092398 | 156 | cerevisiae | |
| 108. | YMR210w | WO2004/ | 157, | Saccharomyces | PUTATIVE ACYLTRANSFERASE |
| | | 092398 | 158 | cerevisiae | WITH SIMILARITY TO |
| | | | | | EEB1PANDEHT1P |
| 109. | YMR069w | WO2004/ | 161, | Saccharomyces | NAT4N-ALPHA ACETYL |
| | | 092398 | 162 | cerevisiae | TRANSFERASE (N-TERMINAL |
| | | | | | RESIDUES OF HISTONE SH4, |
| | | | | | H2A) |
| 110. | YMR118c | WO2004/ | 219, | Saccharomyces | PROTEIN OF UNKNOWN FUNCTION |
| | | 092398 | 220 | cerevisiae | WITH SIMILARITY TO SUCCINATE |
| | | | | | DEHYDROGENASE CYTOCHROMEB |
| | | | | | SUB- |
| | | | | | UNIT; YMR118C IS NOT AN ESSENTIAL |
| | | | | | GENE |
| 111. | YNL076w | WO2004/ | 163, | Saccharomyces | GI\|1301965\|EMB\|CAA95950.1\|ORFYNL076W |
| | | 092398 | 164 | cerevisiae | |
| 112. | YNL024c | WO2004/ | 165, | Saccharomyces | PUTATIVE PROTEIN OF UN- |
| | | 092398 | 166 | cerevisiae | KNOWN FUNCTION WITH SEVEN |
| | | | | | BETA-STRAND METHYL- |
| | | | | | TRANSFERASE MOTIF |
| 113. | YNL125c | WO2004/ | 167, | Saccharomyces | PROTEIN WITH SIMILARITY TO |
| | | 092398 | 168 | cerevisiae | MONOCARBOXYLATE PERMEASES |
| 114. | YNL029c | WO2004/ | 169, | Saccharomyces | PUTATIVE MANNOSYL TRANSFERASE |
| | | 092398 | 170 | cerevisiae | INVOLVED IN PROTEIN |
| | | | | | GLYCOSYLATION; MEMBER |
| | | | | | OF THE KRE2/MNT1 MANNOSYL |
| | | | | | TRANSFERASE FAMILY |
| 115. | YMR115w | WO2004/ | 171, | Saccharomyces | HYPOTHETICAL ORF |
| | | 092398 | 172 | cerevisiae | |
| 116. | YNL282W | WO2006 | 166 | Saccharomyces | SUBUNIT OF BOTH RNASE MRP |
| | | 032708 | | cerevisiae | |
| 117. | YAL046c | WO2004/ | 15, | Saccharomyces | HYPOTHETICAL PROTEIN |
| | | 092398 | 16 | cerevisiae | |
| 118. | YNL244c | WO2004/ | 173, | Saccharomyces | TRANSLATION INITIATION FACTOR |
| | | 092398 | 174 | cerevisiae | EIF1; COMPONENT OF A |
| | | | | | COMPLEX INVOLVED IN RECOGNITION |
| | | | | | OF THE INITIATOR |
| | | | | | CODON; MODULATES TRANSLATION |
| | | | | | ACCURACY AT THE INITIATION |
| | | | | | PHASE |
| 119. | YNL334c | WO2004/ | 175, | Saccharomyces | SNO2 PROTEIN IS RELATED |
| | | 092398 | 176 | cerevisiae | WITH B(1)BIOSYNTHESIS DURING |
| | | | | | THE EXPONENTIAL PHASE |
| 120. | YNR029c | WO2006 | | Saccharomyces | HYPOTHETICAL PROTEIN |
| | | 032708 | | cerevisiae | |
| 121. | YNR018w | WO2004/ | 177, | Saccharomyces | PROTEIN OF UNKNOWN FUNCTION |
| | | 092398 | 178 | cerevisiae | LOCALISED TO MITOCHONDRIA |
| 122. | YNL277w | WO2004/ | 179, | Saccharomyces | L-HOMOSERINE-O- |
| | | 092398 | 180 | cerevisiae | ACETYLTRANSFERASE |
| 123. | YOL118c | WO2004/ | 181, | Saccharomyces | HYPOTHETICAL PROTEIN |
| | | 092398 | 182 | cerevisiae | |
| 124. | YOL123w | WO2004/ | 183, | Saccharomyces | SUBUNIT OF CLEAVAGE FACTORI |
| | | 092398 | 184 | cerevisiae | |
| 125. | YOR020c | WO2004/ | 185, | Saccharomyces | 10 KDA HEAT SHOCK PROTEIN |
| | | 092398 | 186 | cerevisiae | |
| 126. | Y- | WO2006 | | Saccharomyces | HYPOTHETICAL PROTEIN |
| | OR154w | 032708 | | cerevisiae | |
| 127. | YOL116w | WO2004/ | 187, | Saccharomyces | TRANSCRIPTIONAL ACTIVATOR |
| | | 092398 | 188 | cerevisiae | |
| 128. | Y- | WO2006 | | Saccharomyces | MITOCHONDRIAL INNER MEMBRANE |
| | OR266W | 032708 | | cerevisiae | PROTEIN INVOLVED IN |
| | | | | | EXPORT OF PROTEINS FROM |
| | | | | | THE MITOCHONDRIAL MATRIX |
| 129. | YPL103c | WO2006 | | Saccharomyces | UNCHARACTERIZED ORF |
| | | 032708 | | cerevisiae | |
| 130. | | WO2004/ | 21, | Saccharomyces | HYPOTHETICAL PROTEIN |
| | | 092398 | 22 | cerevisiae | |
| 131. | Y- | WO2004/ | 189, | Saccharomyces | PROTEIN OF UNKNOWN FUNCTION |
| | OR305w | 092398 | 190 | cerevisiae | |
| 132. | YKL057c | WO2006 | | Saccharomyces | SUBUNIT OF THE NUP84P SUB- |
| | | 032708 | | cerevisiae | COMPLEX OF THE NUCLEAR |
| | | | | | PORE COMPLEX (NPC) |
| 133. | YDR205w | WO2004/ | 229, | Saccharomyces | MEMBER OF THE CATION DIFFUSION |
| | | 092398 | 230 | cerevisiae | FACILITATOR FAMILY |
| 134. | YPL267w | WO2004/ | 191, | Saccharomyces | PUTATIVE TRANSCRIPTION |
| | | 092398 | 192 | cerevisiae | FACTOR |
| 135. | YPL229w | WO2004/ | 193, | Saccharomyces | PUTATIVE PROTEIN OF UN- |
| | | 092398 | 194 | cerevisiae | KNOWN FUNCTION |
| 136. | YPL038w | WO2004 | 195, | Saccharomyces | ZINC-FINGER DNA- |
| | | 092398 | 196 | cerevisiae | BINDING PROTEIN |
| 137. | YPR047w | WO2004/ | 197, | Saccharomyces | ALPHASUBUNIT OF YEAST MITOCHONDRIAL |
| | | 092398 | 198 | cerevisiae | PHENYL |
| | | | | | ALANYL- |
| | | | | | TRNASYNTHETASE; MSF1P |
| 138. | YPR052C | WO2004/ | 221, | Saccharomyces | HOMOLOGOUS TO MAMMALIAN |
| | | 092398 | 222 | cerevisiae | HIGH MOBILITY GROUP PROTEINS1 |
| | | | | | AND2; FUNCTIONS REDUNDANTLY |
| | | | | | WITH THE HIGHLY |
| | | | | | HOMOLOGOUS GENE |
| 139. | YNR008w | WO2004/ | 233, | Saccharomyces | ACYLTRANSFERASE THAT |
| | | 092398 | 234 | cerevisiae | CATALYZES DIACYLGLYCEROL |
| | | | | | ESTERIFICATION |
| 140. | YOL103w | WO2004/ | 203, | Saccharomyces | MYO-INOSITOL TRANSPORTER |
| | | 092398 | 204 | cerevisiae | WITH STRONG SIMILARITY TO |
| | | | | | THE MAJOR MYO-INOSITOL |
| | | | | | TRANSPORTER ITR1P |
| 141. | Y- | WO2004/ | 209, | Saccharomyces | GAMMA SUBUNIT OF THE |
| | OR260w | 092398 | 210 | cerevisiae | TRANSLATION INITIATION FACTOR |
| | | | | | EIF 2B |
| 142. | YOR360c | WO2004/ | 211, | Saccharomyces | HIGH-AFFINITY CYCLIC AMP |
| | | 092398 | 212 | cerevisiae | PHOSPHODIESTERASE |
| 143. | Y- | WO2004/ | 235, | Saccharomyces | PUTATIVE LIPASE OF THE PEROXISOMAL |
| | OR084w | 092398 | 236 | cerevisiae | MATRIX |
| 144. | YPL030w | WO2006 | | Saccharomyces | HYPOTHETICAL PROTEIN |
| | | 032708 | | cerevisiae | |
| 145. | YGL263W | WO2004/ | 1, 2 | Saccharomyces | PUTATIVE MEMBRANE TRAFFICKING |
| | | 092398 | | cerevisiae | PROTEIN |
| 146. | YDL057w | WO2006 | 129 | Saccharomyces | WEAK SIMILARITY TO HYPOTHETICAL |
| | | 013010 | | cerevisiae | PROTEIN A. THALIANA |
| 147. | YGR054W | WO2004/ | 237, | Saccharomyces | EUKARYOTIC INITIATION FACTOR |
| | | 092398 | 238 | cerevisiae | (EIF) 2A |
| 148. | YBR064w | WO2004/ | 245, | Saccharomyces | PROBABLE MEMBRANE PROTEIN |
| | | 092398 | 246 | cerevisiae | |
| 149. | YAL067C | WO2004/ | 241, | Saccharomyces | PUTATIVE PERMEASE |
| | | 092398 | 242 | cerevisiae | |
| 150. | YER174c | WO2004/ | 33, | Saccharomyces | HYDROPEROXIDE, SUPEROXIDE- |
| | | 092398 | 34 | cerevisiae | RADICAL RESPONSIVE |
| | | | | | GLUTATHIONE-DEPENDENT |
| | | | | | OXIDOREDUCTASE; |
| | | | | | MONOTHIOLGLUTAREDOXIN |
| | | | | | SUBFAMILY MEMBER ALONG |
| | | | | | WITH GRX3P, GRX5P; PROTECTS |
| | | | | | CELLS FROM OXIDATIVE |
| | | | | | DAMAGE |
| 151. | YBR051w | WO2004/ | 35, | Saccharomyces | PROBABLE MEMBRANE PROTEIN |
| | | 092398 | 36 | cerevisiae | |
| 152. | YER175c | WO2004/ | 37, | Saccharomyces | TRANS-ACONITATE METHYL- |
| | | 092398 | 38 | cerevisiae | TRANSFERASE |
| 153. | YDR521w | WO2004/ | 39, | Saccharomyces | HYPOTHETICAL PROTEIN |
| | | 092398 | 40 | cerevisiae | |
| 154. | YER123w | WO2004/ | 41 | Saccharomyces | CASEIN KINASEI |
| | | 092398 | | cerevisiae | |
| 155. | YER137C | WO2004/ | 281, | Saccharomyces | HYPOTHETICAL PROTEIN |
| | | 092398 | 282 | cerevisiae | |
| 156. | YEL052w | WO2004/ | 47, | Saccharomyces | PUTATIVEATPASE OF THE |
| | | 092398 | 48 | cerevisiae | CDC48/PAS1/SEC18(AAA) FAMILY |
| 157. | YDR536w | WO2004/ | 49, | Saccharomyces | STL1P: PLASMA MEMBRANE |
| | | 092398 | 50 | cerevisiae | SUGAR TRANSPORTER |
| 158. | YDR513w | WO2004/ | 51, | Saccharomyces | TTR1P: GLUTAREDOXIN |
| | | 092398 | 52 | cerevisiae | |
| 159. | YGR060w | WO2006 | | Saccharomyces | ERG25C- |
| | | 032708 | | cerevisiae | 4STEROLMETHYLOXIDASE |
| 160. | YEL041w | WO2004/ | 55, | Saccharomyces | ATP-NADH |
| | | 092398 | 56 | cerevisiae | KINASE; PHOSOPHORYLATES |
| | | | | | BOTH NAD, NADH |
| 161. | YEL001C | WO2006 | 54 | Saccharomyces | PUTATIVE PROTEIN OF UN- |
| | | 032708 | | cerevisiae | KNOWN FUNCTION |
| 162. | YDR415c | WO2004/ | 45, | Saccharomyces | STRONG SIMILARITY TO BACTERIAL |
| | | 092398 | 46 | cerevisiae | LEUCYL AMINOPEPTIDASE |
| 163. | YDL238c | WO2004/ | 57, | Saccharomyces | GUANINE DEAMINASE |
| | | 092398 | 58 | cerevisiae | |
| 164. | ROB5 | US2006/ | 1, 2 | BI | LATE EMBRYOGENESIS ABUNDANT |
| | | 0122375 | | | TYPE PROTEIN ROB5 |
| 165. | GOICDS_CDS0012 | WO92/09685 | Claim 3 | Arabidopsis | CYCLIN-DEPENDENT PROTEIN- |
| | | | | thaliana | KINASE |
| 166. | GOICDS_CDS0045 | WO2005/ | 4 | Arabidopsis | CYCLIN-DEPENDENT PROTEIN |
| | | 024029 | | thaliana | KINASE CCDC2B2); CELLCYCLE |
| | | | | | REGULATION NOTE: THIS IS A |
| | | | | | TRUNCATED PROTEIN |
| 167. | GOICDS_CDS0185 | WO2007 | 167 | Arabidopsis | PUTATIVE TRANSCRIPTION- |
| | | 064724 | | thaliana | FACTOR |
| 168. | | WO2005 | 2 | Arabidopsis | PUTATIVE PP2A INHIBITOR; INVOLVED |
| | | 094562 | | thaliana | IN NUCLEOSOME ASSEMBLY |
| 169. | | WO2004 | Claim 8 | Arabidopsis | CYTOKININOXIDASE; DEGRADATION |
| | | 038027 | | thaliana | OF CYTOKININ |
| 170. | GOICDS_CDS0647 | WO2005 | 2 | Arabidopsis | CYCLIN-DEPENDENT PROTEIN |
| | | 083094 | | thaliana | KINASE; D-TYPE |
| | | | | | (SER/THRPROTEIN KINASE); |
| | | | | | CELLCYCLE REGULATION |
| 171. | | WO2006/ | 2 | Arabidopsis | TYROSINE KINASE |
| | | 008271 | | thaliana | |
| 172. | GOICDS_CDS1499_2 | WO01/96580 | 2, 4, 6, | Arabidopsis | CYTOKININOXIDASE; DEGRADATION |
| | | | 8, 10, | thaliana | OF CYTOKININ |
| | | | 12, 32 | | |
| | | | or 35 | | |
| 173. | GOICDS_CDS1532 | WO2006 | 2 | Arabidopsis | SODIUM TRANSPORTER |
| | | 045829 | | thaliana | |
| 174. | GOICDS_CDS3325 | WO2007 | 199 | Arabidopsis | TRANSCRIPTION FACTOR |
| | | 064724 | | thaliana | |
| 175. | GOICDS_CDS0218 | WO2007 | 2 | Arabidopsis | CATALYZES THE DECARBOXYLATION |
| | | 113237 | | thaliana | OF 4- |
| | | | | | PHOSPHOPANTOTHENOYL |
| | | | | | CYSTEINETO 4- |
| | | | | | PHOSPHOPANTETHEINE |
| 176. | GOICDS_CDS1536 | WO2004/ | 2 | Arabidopsis | SALT INDUCIBLE TRANSCRIPTIONAL |
| | | 058980 | | thaliana | REGULATOR (CYS- |
| | | | | | 2/HIS-2-TYPE ZINC FINGER) |
| 177. | | WO2004/ | 27 | Arabidopsis | TRANSCRIPTION FACTOR; |
| | | 058980 | | thaliana | CYS2/HIS2-TYPE ZINC FINGER |
| | | | | | PROTEIN |
| 178. | GOICDS_CDS3074 | WO2006/ | 8 | Arabidopsis | SYT protein |
| | | 079655 | | thaliana | |
| 179. | DPprotein | WO2005/ | 2 | Arabidopsis | TRANSCRIPTION FACTOR; CELL |
| | | 117568 | | thaliana | CYCLE REGULATION |
| 180. | GOICDS_CDS0078 | WO2006 | 2 | Arabidopsis | RNA BINDING; CELL PROLIFERATION |
| | | 018432 | | thaliana | |
| 181. | GOICDS_CDS0827 | WO2006 | 2 | Arabidopsis | SERINE/THREONINE- |
| | | 005771 | | thaliana | PROTEIN KINASE |
| 182. | | WO2004/ | 2 | Arabidopsis | METAL-BINDING; RESISTANCE |
| | | 090142 | | thaliana | TO METALS; DETOXIFICATION |
| | | | | | OF HYDROXYL RADICALS |
| 183. | GOICDS_CDS1522 | WO2006/ | 2 | Arabidopsis | PUTATIVE ZINC BINDING PROTEIN |
| | | 005751 | | thaliana | |
| 184. | GOICDS_CDS2591 | WO2004 | 2 | Arabidopsis | NON-SYMBIOTIC HEMOGLOBIN2 |
| | | 087755 | | thaliana | |
| 185. | GOICDS_CDS3142 | WO2006/ | 14 | Arabidopsis | RECEPTOR-LIKE |
| | | 131547 | | thaliana | KINASE; SERINE/THREONINE- |
| | | | | | PROTEIN KINASE; LEUCINE-RICH |
| | | | | | REPEAT(LRR)CONTAINING |
| | | | | | KINASE |
| 186. | | WO2006/ | 804 | Arabidopsis | |
| | | 079655 | | thaliana | |
| 187. | | WO2007/ | 14 | | |
| | | 138070 | | | |
| 188. | | WO2007 | 132 | Arabidopsis | CELLCYCLE REGULATION |
| | | 064724 | | thaliana | |
| 189. | CDS3298 | WO2007/ | 602 | Arabidopsis | |
| | | 113237 | | thaliana | |
| 190. | | WO2004/ | 10 | BV | PUTATIVE UBIQUITIN- |
| | | 090141 | | | PROTEIN LIGASE |
| 191. | GOICDS_CDS2767 | WO2004 | 2 | BV | NON-SYMBIOTIC HEMOGLOBIN2 |
| | | 087755 | | | |
| 192. | YIL076w | WO2006 | 98 | Saccharomyces | EPSILON-COP SUBUNIT OF THE |
| | | 032708 | | cerevisiae | COATOMER; REGULATES |
| | | | | | RETROGRADEGOLGI-TO-ER PROTEIN |
| | | | | | TRAFFIC; STABILIZE |
| | | | | | SCOP1P |
| 193. | YIL156W | WO2006 | | Saccharomyces | UBIQUITIN-SPECIFIC PROTEASE |
| | | 032708 | | cerevisiae | THAT CLEAVE SUBIQUITIN- |
| | | | | | PROTEIN FUSIONS |
| 194. | YIL172C | WO2007 | 225 | Saccharomyces | PUTATIVE PROTEIN OF UN- |
| | | 020198 | | cerevisiae | KNOWN FUNCTION WITH SIMILARITY |
| | | | | | TO GLUCOSIDASES |
| 195. | YMR095C | WO2006 | 2 | Saccharomyces | PUTATIVE GLUTAMINE AMIDO- |
| | | 013010 | | cerevisiae | TRANSFERASE |
| 196. | YMR217W | WO2007 | 244 | Saccharomyces | GMP SYNTHASE |
| | | 020198 | | cerevisiae | |
| 197. | GOICDS_CDS0689 | WO2005 | 2 | Nicotianatabacum | UNKNOWN (UNDEFINED ROLEIN |
| | | 049646 | | | CELLCYCLE) |
| 198. | GOICDS_CDS0701 | WO2006 | 15 | Nicotianatabacum | RNA BINDING; PROBABLY INVOLVED |
| | | 018432 | | | IN RNA PRCESSING |
| | | | | | (I.E.SPLICING) |
| 199. | EF-Tu | WO2006/ | 2 | Nicotianatabacum | TRANSLATION ELONGATION |
| | | 067232 | | | FACTOR; TRNA BINDING |
| 200. | GOICDS_CDS0669 | WO2005 | 2 | Nicotianatabacum | FUNCTION UNKNOWN (HYPOTHETICALLY |
| | | 059147 | | | GROWTH RELATED) |
| 201. | GOICDS_CDS0671 | WO2004 | 2 | Nicotianatabacum | AAA-ATPASE; THIS IS A TRUNCATED |
| | | 087927 | | | PROTEIN THAT CONTAINS |
| | | | | | ONLY THE ATPASE DOMAIN |
| | | | | | OF ATOB3-LIKE PROTEIN |
| 202. | GOICDS | WO2007/ | 042 | Oryza sativa | |
| | | 0647249 | | | |
| 203. | GOICDS_CDS1608 | WO2004/ | 2 | Oryza sativa | VACUOLAR (NA |
| | | 106528 | | | |
| 204. | | WO2006 | 2 | Oryza sativa | TRANSCRIPTION FACTOR; MAY |
| | | 056590 | | | PROMOTE FLORAL TRANSITION |
| | | | | | PAHSE, DIFFERENTIATION |
| | | | | | PROGRAM OF THE VEGETATIVE |
| | | | | | SHOOT |
| 205. | GOICDS_CDS0644_7 | WO2006 | 2 | Oryza sativa | CDKA |
| | | 058897 | | | |
| 206. | | WO2007 | 2 | Oryza sativa | DNA BINDING PROTEIN; |
| | | 099096 | | | INVOLVED IN SEED MATURATION |
| | | | | | (PUTATIVE) |
| 207. | GOICDS_CDS2447 | WO2007/ | 2 | Oryza sativa | TRANSCRIPTION FACTOR; HOMEO |
| | | 051866 | | | DOMAIN LEUCINE ZIPPER- |
| | | | | | PROTEIN |
| 208. | GOICDS_CDS3027 | WO2007/ | 2 | Oryza sativa | |
| | | 113237 | | | |
| 209. | GOISCDS_CDS3159 | WO2007/ | 042 | Oryza sativa | |
| | | 0647249 | | | |
| 210. | GOISCDS | WO2006/ | 2 | Oryza sativa | TRANSCRIPTION FACTOR |
| | | 008271 | | | |
| 211. | GOICDS_CDS0644_7 | WO2006 | 2 | Oryza sativa | CYCLIN-DEPENDENT KINASE |
| | | 058897 | | | |
| 212. | GOICDS_CDS1877 | WO2006/ | 2 | Oryza sativa | CO-CHAPERONE; PROTECTION |
| | | 067236 | | | OF CELLS AGAINST STRESS |
| 213. | | WO2007/ | 2 | Oryza sativa | TRANSCRIPTIONAL REGULATOR |
| | | 003409 | | | (GASIGNALLING REPRESSORINKERNELS) |
| 214. | YPL211w | WO2006 | 218 | Saccharomyces | NUCLEOLAR PROTEIN REQUIRED |
| | | 032708 | | cerevisiae | FOR 60S RIBOSOME |
| | | | | | SUBUNIT BIOGENESIS |
| 215. | YIL121w | WO2006 | 106 | Saccharomyces | MULTIDRUG TRANSPORTER |
| | | 032708 | | cerevisiae | REQUIRED FOR RESISTANCE |
| | | | | | TO QUINIDINE |

TABLE C

| Line | | |
|---|---|---|
| in | Gene | |
| Table B | Name/Locus ID | Active ingredientB |
| 1 | ATACCD | acephate |
| 1 | ATACCD | chlorpyrifos |
| 1 | ATACCD | dimethoate |
| 1 | ATACCD | methamidophos |
| 1 | ATACCD | terbufos |
| 1 | ATACCD | aldicarb |
| 1 | ATACCD | carbofuran |
| 1 | ATACCD | bifenthrin |
| 1 | ATACCD | cypermethrin |
| 1 | ATACCD | alpha-cypermethrin |
| 1 | ATACCD | deltamethrin |
| 1 | ATACCD | lambda-cyhalothrin |
| 1 | ATACCD | tefluthrin |
| 1 | ATACCD | flufenoxuron |
| 1 | ATACCD | teflubenzuron |
| 1 | ATACCD | spirotetramat; |
| 1 | ATACCD | clothianidin |
| 1 | ATACCD | imidacloprid |
| 1 | ATACCD | thiamethoxam |
| 1 | ATACCD | endosulfan |
| 1 | ATACCD | fipronil |
| 1 | ATACCD | abamectin |
| 1 | ATACCD | spinosad |
| 1 | ATACCD | spinetoram |
| 1 | ATACCD | hydramethylnon; |
| 1 | ATACCD | chlorfenapyr; |
| 1 | ATACCD | indoxacarb |
| 1 | ATACCD | metaflumizone |
| 1 | ATACCD | flubendiamide |
| 1 | ATACCD | chlorantraniliprole |
| 1 | ATACCD | cyazypyr(HGW86) |
| 1 | ATACCD | Azoxystrobin |
| 1 | ATACCD | Dimoxystrobin |
| 1 | ATACCD | Kresoxim-methyl |
| 1 | ATACCD | Orysastrobin |
| 1 | ATACCD | Pyraclostrobin |
| 1 | ATACCD | Trifloxystrobin |
| 1 | ATACCD | Bixafen |
| 1 | ATACCD | Boscalid |
| 1 | ATACCD | Isopyrazam |
| 1 | ATACCD | Metalaxyl |
| 1 | ATACCD | Penthiopyrad |
| 1 | ATACCD | 3-Difluoromethyl-1- |
| | | methyl-1H-pyrazole- |
| | | 4-carboxylic |
| | | acid(2′,4′,5′- |
| | | trifluorobiphenyl-2-yl)- |
| | | amide |
| 1 | ATACCD | Dimethomorph |
| 1 | ATACCD | Difenoconazole |
| 1 | ATACCD | Epoxiconazole |
| 1 | ATACCD | Fluquinconazole |
| 1 | ATACCD | Metconazol |
| 1 | ATACCD | Propiconazole |
| 1 | ATACCD | Prothioconazole |
| 1 | ATACCD | Tebuconazole |
| 1 | ATACCD | Triticonazole |
| 1 | ATACCD | Prochloraz |
| 1 | ATACCD | Carbendazim |
| 1 | ATACCD | Cyprodinil |
| 1 | ATACCD | Pyrimethanil |
| 1 | ATACCD | Fenpropimorph |
| 1 | ATACCD | Tridemorph |
| 1 | ATACCD | Iprodione |
| 1 | ATACCD | 5-ethyl-6-octyl-[1,2,4]triazolo[1, |
| | | 5-a]pyrimidine- |
| | | 7-ylamine |
| 1 | ATACCD | Mancozeb |
| 1 | ATACCD | Maneb |
| 1 | ATACCD | Metiram |
| 1 | ATACCD | Dithianon |
| 1 | ATACCD | Chlorothalonil |
| 1 | ATACCD | ThiophanateMethyl |
| 1 | ATACCD | Cymoxanil |
| 1 | ATACCD | Metrafenone |
| 1 | ATACCD | Acetochlor |
| 1 | ATACCD | Dimethenamid |
| 1 | ATACCD | Metolachlor |
| 1 | ATACCD | Metazachlor |
| 1 | ATACCD | Glyphosate |
| 1 | ATACCD | Glufosinate |
| 1 | ATACCD | Sulfosate |
| 1 | ATACCD | Fenoxaprop |
| 1 | ATACCD | Paraquat |
| 1 | ATACCD | Cycloxydim |
| 1 | ATACCD | Profoxydim |
| 1 | ATACCD | Sethoxydim |
| 1 | ATACCD | Tepraloxydim |
| 1 | ATACCD | Pendimethalin |
| 1 | ATACCD | Acifluorfen |
| 1 | ATACCD | Imazamethabenz |
| 1 | ATACCD | Imazamox |
| 1 | ATACCD | Imazapic |
| 1 | ATACCD | Imazapyr |
| 1 | ATACCD | Imazaquin |
| 1 | ATACCD | Imazethapyr |
| 1 | ATACCD | 2,4-D |
| 1 | ATACCD | Chloridazon |
| 1 | ATACCD | Picloram |
| 1 | ATACCD | Picolinafen |
| 1 | ATACCD | Cyclosulfamuron |
| 1 | ATACCD | Triflusulfuron |
| 1 | ATACCD | Atrazine |
| 1 | ATACCD | Pyroxasulfone |
| 1 | ATACCD | Bentazone |
| 1 | ATACCD | Cinidon-ethly |
| 1 | ATACCD | Cinmethylin |
| 1 | ATACCD | Dicamba |
| 1 | ATACCD | Diflufenzopyr |
| 1 | ATACCD | Quinclorac |
| 1 | ATACCD | Quinmerac |
| 1 | ATACCD | Mesotrione |
| 1 | ATACCD | Saflufenacil |
| 1 | ATACCD | Topramezone; |
| 5 | ATSTE24 | acephate |
| 5 | ATSTE24 | chlorpyrifos |
| 5 | ATSTE24 | dimethoate |
| 5 | ATSTE24 | methamidophos |
| 5 | ATSTE24 | terbufos |
| 5 | ATSTE24 | aldicarb |
| 5 | ATSTE24 | carbofuran |
| 5 | ATSTE24 | bifenthrin |
| 5 | ATSTE24 | cypermethrin |
| 5 | ATSTE24 | alpha-cypermethrin |
| 5 | ATSTE24 | deltamethrin |
| 5 | ATSTE24 | lambda-cyhalothrin |
| 5 | ATSTE24 | tefluthrin |
| 5 | ATSTE24 | flufenoxuron |
| 5 | ATSTE24 | teflubenzuron |
| 5 | ATSTE24 | spirotetramat; |
| 5 | ATSTE24 | clothianidin |
| 5 | ATSTE24 | imidacloprid |
| 5 | ATSTE24 | thiamethoxam |
| 5 | ATSTE24 | endosulfan |
| 5 | ATSTE24 | fipronil |
| 5 | ATSTE24 | abamectin |
| 5 | ATSTE24 | spinosad |
| 5 | ATSTE24 | spinetoram |
| 5 | ATSTE24 | hydramethylnon; |
| 5 | ATSTE24 | chlorfenapyr; |
| 5 | ATSTE24 | indoxacarb |
| 5 | ATSTE24 | metaflumizone |
| 5 | ATSTE24 | flubendiamide |
| 5 | ATSTE24 | chlorantraniliprole |
| 5 | ATSTE24 | cyazypyr(HGW86) |
| 5 | ATSTE24 | Azoxystrobin |
| 5 | ATSTE24 | Dimoxystrobin |
| 5 | ATSTE24 | Kresoxim-methyl |
| 5 | ATSTE24 | Orysastrobin |
| 5 | ATSTE24 | Pyraclostrobin |
| 5 | ATSTE24 | Trifloxystrobin |
| 5 | ATSTE24 | Bixafen |
| 5 | ATSTE24 | Boscalid |
| 5 | ATSTE24 | Isopyrazam |
| 5 | ATSTE24 | Metalaxyl |
| 5 | ATSTE24 | Penthiopyrad |
| 5 | ATSTE24 | 3-Difluoromethyl-1- |
| | | methyl-1H-pyrazole- |
| | | 4-carboxylic |
| | | acid(2′,4′,5′-trifluoro- |
| | | biphenyl-2-yl)-amide |
| 5 | ATSTE24 | Dimethomorph |
| 5 | ATSTE24 | Difenoconazole |
| 5 | ATSTE24 | Epoxiconazole |
| 5 | ATSTE24 | Fluquinconazole |
| 5 | ATSTE24 | Metconazol |
| 5 | ATSTE24 | Propiconazole |
| 5 | ATSTE24 | Prothioconazole |
| 5 | ATSTE24 | Tebuconazole |
| 5 | ATSTE24 | Triticonazole |
| 5 | ATSTE24 | Prochloraz |
| 5 | ATSTE24 | Carbendazim |
| 5 | ATSTE24 | Cyprodinil |
| 5 | ATSTE24 | Pyrimethanil |
| 5 | ATSTE24 | Fenpropimorph |
| 5 | ATSTE24 | Tridemorph |
| 5 | ATSTE24 | Iprodione |
| 5 | ATSTE24 | 5-ethyl-6-octyl-[1,2,4]triazolo[1, |
| | | 5-a]pyrimidine- |
| | | 7-ylamine |
| 5 | ATSTE24 | Mancozeb |
| 5 | ATSTE24 | Maneb |
| 5 | ATSTE24 | Metiram |
| 5 | ATSTE24 | Dithianon |
| 5 | ATSTE24 | Chlorothalonil |
| 5 | ATSTE24 | ThiophanateMethyl |
| 5 | ATSTE24 | Cymoxanil |
| 5 | ATSTE24 | Metrafenone |
| 5 | ATSTE24 | Acetochlor |
| 5 | ATSTE24 | Dimethenamid |
| 5 | ATSTE24 | Metolachlor |
| 5 | ATSTE24 | Metazachlor |
| 5 | ATSTE24 | Glyphosate |
| 5 | ATSTE24 | Glufosinate |
| 5 | ATSTE24 | Sulfosate |
| 5 | ATSTE24 | Fenoxaprop |
| 5 | ATSTE24 | Paraquat |
| 5 | ATSTE24 | Cycloxydim |
| 5 | ATSTE24 | Profoxydim |
| 5 | ATSTE24 | Sethoxydim |
| 5 | ATSTE24 | Tepraloxydim |
| 5 | ATSTE24 | Pendimethalin |
| 5 | ATSTE24 | Acifluorfen |
| 5 | ATSTE24 | Imazamethabenz |
| 5 | ATSTE24 | Imazamox |
| 5 | ATSTE24 | Imazapic |
| 5 | ATSTE24 | Imazapyr |
| 5 | ATSTE24 | Imazaquin |
| 5 | ATSTE24 | Imazethapyr |
| 5 | ATSTE24 | 2,4-D |
| 5 | ATSTE24 | Chloridazon |
| 5 | ATSTE24 | Picloram |
| 5 | ATSTE24 | Picolinafen |
| 5 | ATSTE24 | Cyclosulfamuron |
| 5 | ATSTE24 | Triflusulfuron |
| 5 | ATSTE24 | Atrazine |
| 5 | ATSTE24 | Pyroxasulfone |
| 5 | ATSTE24 | Bentazone |
| 5 | ATSTE24 | Cinidon-ethly |
| 5 | ATSTE24 | Cinmethylin |
| 5 | ATSTE24 | Dicamba |
| 5 | ATSTE24 | Diflufenzopyr |
| 5 | ATSTE24 | Quinclorac |
| 5 | ATSTE24 | Quinmerac |
| 5 | ATSTE24 | Mesotrione |
| 5 | ATSTE24 | Saflufenacil |
| 5 | ATSTE24 | Topramezone; |
| 7 | b2965 | acephate |
| 7 | b2965 | chlorpyrifos |
| 7 | b2965 | dimethoate |
| 7 | b2965 | methamidophos |
| 7 | b2965 | terbufos |
| 7 | b2965 | aldicarb |
| 7 | b2965 | carbofuran |
| 7 | b2965 | bifenthrin |
| 7 | b2965 | cypermethrin |
| 7 | b2965 | alpha-cypermethrin |
| 7 | b2965 | deltamethrin |
| 7 | b2965 | lambda-cyhalothrin |
| 7 | b2965 | tefluthrin |
| 7 | b2965 | flufenoxuron |
| 7 | b2965 | teflubenzuron |
| 7 | b2965 | spirotetramat; |
| 7 | b2965 | clothianidin |
| 7 | b2965 | imidacloprid |
| 7 | b2965 | thiamethoxam |
| 7 | b2965 | endosulfan |
| 7 | b2965 | fipronil |
| 7 | b2965 | abamectin |
| 7 | b2965 | spinosad |
| 7 | b2965 | spinetoram |
| 7 | b2965 | hydramethylnon; |
| 7 | b2965 | chlorfenapyr; |
| 7 | b2965 | indoxacarb |
| 7 | b2965 | metaflumizone |
| 7 | b2965 | flubendiamide |
| 7 | b2965 | chlorantraniliprole |
| 7 | b2965 | cyazypyr(HGW86) |
| 7 | b2965 | Azoxystrobin |
| 7 | b2965 | Dimoxystrobin |
| 7 | b2965 | Kresoxim-methyl |
| 7 | b2965 | Orysastrobin |
| 7 | b2965 | Pyraclostrobin |
| 7 | b2965 | Trifloxystrobin |
| 7 | b2965 | Bixafen |
| 7 | b2965 | Boscalid |
| 7 | b2965 | Isopyrazam |
| 7 | b2965 | Metalaxyl |
| 7 | b2965 | Penthiopyrad |
| 7 | b2965 | 3-Difluoromethyl-1- |
| | | methyl-1H-pyrazole- |
| | | 4-carboxylic |
| | | acid(2′,4′,5′-trifluoro- |
| | | biphenyl-2-yl)-amide |
| 7 | b2965 | Dimethomorph |
| 7 | b2965 | Difenoconazole |
| 7 | b2965 | Epoxiconazole |
| 7 | b2965 | Fluquinconazole |
| 7 | b2965 | Metconazol |
| 7 | b2965 | Propiconazole |
| 7 | b2965 | Prothioconazole |
| 7 | b2965 | Tebuconazole |
| 7 | b2965 | Triticonazole |
| 7 | b2965 | Prochloraz |
| 7 | b2965 | Carbendazim |
| 7 | b2965 | Cyprodinil |
| 7 | b2965 | Pyrimethanil |
| 7 | b2965 | Fenpropimorph |
| 7 | b2965 | Tridemorph |
| 7 | b2965 | Iprodione |
| 7 | b2965 | 5-ethyl-6-octyl-[1,2,4]triazolo[1, |
| | | 5-a]pyrimidine- |
| | | 7-ylamine |
| 7 | b2965 | Mancozeb |
| 7 | b2965 | Maneb |
| 7 | b2965 | Metiram |
| 7 | b2965 | Dithianon |
| 7 | b2965 | Chlorothalonil |
| 7 | b2965 | ThiophanateMethyl |
| 7 | b2965 | Cymoxanil |
| 7 | b2965 | Metrafenone |
| 7 | b2965 | Acetochlor |
| 7 | b2965 | Dimethenamid |
| 7 | b2965 | Metolachlor |
| 7 | b2965 | Metazachlor |
| 7 | b2965 | Glyphosate |
| 7 | b2965 | Glufosinate |
| 7 | b2965 | Sulfosate |
| 7 | b2965 | Fenoxaprop |
| 7 | b2965 | Paraquat |
| 7 | b2965 | Cycloxydim |
| 7 | b2965 | Profoxydim |
| 7 | b2965 | Sethoxydim |
| 7 | b2965 | Tepraloxydim |
| 7 | b2965 | Pendimethalin |
| 7 | b2965 | Acifluorfen |
| 7 | b2965 | Imazamethabenz |
| 7 | b2965 | Imazamox |
| 7 | b2965 | Imazapic |
| 7 | b2965 | Imazapyr |
| 7 | b2965 | Imazaquin |
| 7 | b2965 | Imazethapyr |
| 7 | b2965 | 2,4-D |
| 7 | b2965 | Chloridazon |
| 7 | b2965 | Picloram |
| 7 | b2965 | Picolinafen |
| 7 | b2965 | Cyclosulfamuron |
| 7 | b2965 | Triflusulfuron |
| 7 | b2965 | Atrazine |
| 7 | b2965 | Pyroxasulfone |
| 7 | b2965 | Bentazone |
| 7 | b2965 | Cinidon-ethly |
| 7 | b2965 | Cinmethylin |
| 7 | b2965 | Dicamba |
| 7 | b2965 | Diflufenzopyr |
| 7 | b2965 | Quinclorac |
| 7 | b2965 | Quinmerac |
| 7 | b2965 | Mesotrione |
| 7 | b2965 | Saflufenacil |
| 7 | b2965 | Topramezone; |
| 10 | B0730 | acephate |
| 10 | B0730 | chlorpyrifos |
| 10 | B0730 | dimethoate |
| 10 | B0730 | methamidophos |
| 10 | B0730 | terbufos |
| 10 | B0730 | aldicarb |
| 10 | B0730 | carbofuran |
| 10 | B0730 | bifenthrin |
| 10 | B0730 | cypermethrin |
| 10 | B0730 | alpha-cypermethrin |
| 10 | B0730 | deltamethrin |
| 10 | B0730 | lambda-cyhalothrin |
| 10 | B0730 | tefluthrin |
| 10 | B0730 | flufenoxuron |
| 10 | B0730 | teflubenzuron |
| 10 | B0730 | spirotetramat; |
| 10 | B0730 | clothianidin |
| 10 | B0730 | imidacloprid |
| 10 | B0730 | thiamethoxam |
| 10 | B0730 | endosulfan |
| 10 | B0730 | fipronil |
| 10 | B0730 | abamectin |
| 10 | B0730 | spinosad |
| 10 | B0730 | spinetoram |
| 10 | B0730 | hydramethylnon; |
| 10 | B0730 | chlorfenapyr; |
| 10 | B0730 | indoxacarb |
| 10 | B0730 | metaflumizone |
| 10 | B0730 | flubendiamide |
| 10 | B0730 | chlorantraniliprole |
| 10 | B0730 | cyazypyr(HGW86) |
| 10 | B0730 | Azoxystrobin |
| 10 | B0730 | Dimoxystrobin |
| 10 | B0730 | Kresoxim-methyl |
| 10 | B0730 | Orysastrobin |
| 10 | B0730 | Pyraclostrobin |
| 10 | B0730 | Trifloxystrobin |
| 10 | B0730 | Bixafen |
| 10 | B0730 | Boscalid |
| 10 | B0730 | Isopyrazam |
| 10 | B0730 | Metalaxyl |
| 10 | B0730 | Penthiopyrad |
| 10 | B0730 | 3-Difluoromethyl-1- |
| | | methyl-1H-pyrazole- |
| | | 4-carboxylic |
| | | acid(2′,4′,5′-trifluoro- |
| | | biphenyl-2-yl)-amide |
| 10 | B0730 | Dimethomorph |
| 10 | B0730 | Difenoconazole |
| 10 | B0730 | Epoxiconazole |
| 10 | B0730 | Fluquinconazole |
| 10 | B0730 | Metconazol |
| 10 | B0730 | Propiconazole |
| 10 | B0730 | Prothioconazole |
| 10 | B0730 | Tebuconazole |
| 10 | B0730 | Triticonazole |
| 10 | B0730 | Prochloraz |
| 10 | B0730 | Carbendazim |
| 10 | B0730 | Cyprodinil |
| 10 | B0730 | Pyrimethanil |
| 10 | B0730 | Fenpropimorph |
| 10 | B0730 | Tridemorph |
| 10 | B0730 | Iprodione |
| 10 | B0730 | 5-ethyl-6-octyl-[1,2,4]triazolo[1, |
| | | 5-a]pyrimidine- |
| | | 7-ylamine |
| 10 | B0730 | Mancozeb |
| 10 | B0730 | Maneb |
| 10 | B0730 | Metiram |
| 10 | B0730 | Dithianon |
| 10 | B0730 | Chlorothalonil |
| 10 | B0730 | ThiophanateMethyl |
| 10 | B0730 | Cymoxanil |
| 10 | B0730 | Metrafenone |
| 10 | B0730 | Acetochlor |
| 10 | B0730 | Dimethenamid |
| 10 | B0730 | Metolachlor |
| 10 | B0730 | Metazachlor |
| 10 | B0730 | Glyphosate |
| 10 | B0730 | Glufosinate |
| 10 | B0730 | Sulfosate |
| 10 | B0730 | Fenoxaprop |
| 10 | B0730 | Paraquat |
| 10 | B0730 | Cycloxydim |
| 10 | B0730 | Profoxydim |
| 10 | B0730 | Sethoxydim |
| 10 | B0730 | Tepraloxydim |
| 10 | B0730 | Pendimethalin |
| 10 | B0730 | Acifluorfen |
| 10 | B0730 | Imazamethabenz |
| 10 | B0730 | Imazamox |
| 10 | B0730 | Imazapic |
| 10 | B0730 | Imazapyr |
| 10 | B0730 | Imazaquin |
| 10 | B0730 | Imazethapyr |
| 10 | B0730 | 2,4-D |
| 10 | B0730 | Chloridazon |
| 10 | B0730 | Picloram |
| 10 | B0730 | Picolinafen |
| 10 | B0730 | Cyclosulfamuron |
| 10 | B0730 | Triflusulfuron |
| 10 | B0730 | Atrazine |
| 10 | B0730 | Pyroxasulfone |
| 10 | B0730 | Bentazone |
| 10 | B0730 | Cinidon-ethly |
| 10 | B0730 | Cinmethylin |
| 10 | B0730 | Dicamba |
| 10 | B0730 | Diflufenzopyr |
| 10 | B0730 | Quinclorac |
| 10 | B0730 | Quinmerac |
| 10 | B0730 | Mesotrione |
| 10 | B0730 | Saflufenacil |
| 10 | B0730 | Topramezone; |
| 11 | b1830 | acephate |
| 11 | b1830 | chlorpyrifos |
| 11 | b1830 | dimethoate |
| 11 | b1830 | methamidophos |
| 11 | b1830 | terbufos |
| 11 | b1830 | aldicarb |
| 11 | b1830 | carbofuran |
| 11 | b1830 | bifenthrin |
| 11 | b1830 | cypermethrin |
| 11 | b1830 | alpha-cypermethrin |
| 11 | b1830 | deltamethrin |
| 11 | b1830 | lambda-cyhalothrin |
| 11 | b1830 | tefluthrin |
| 11 | b1830 | flufenoxuron |
| 11 | b1830 | teflubenzuron |
| 11 | b1830 | spirotetramat; |
| 11 | b1830 | clothianidin |
| 11 | b1830 | imidacloprid |
| 11 | b1830 | thiamethoxam |
| 11 | b1830 | endosulfan |
| 11 | b1830 | fipronil |
| 11 | b1830 | abamectin |
| 11 | b1830 | spinosad |
| 11 | b1830 | spinetoram |
| 11 | b1830 | hydramethylnon; |
| 11 | b1830 | chlorfenapyr; |
| 11 | b1830 | indoxacarb |
| 11 | b1830 | metaflumizone |
| 11 | b1830 | flubendiamide |
| 11 | b1830 | chlorantraniliprole |
| 11 | b1830 | cyazypyr(HGW86) |
| 11 | b1830 | Azoxystrobin |
| 11 | b1830 | Dimoxystrobin |
| 11 | b1830 | Kresoxim-methyl |
| 11 | b1830 | Orysastrobin |
| 11 | b1830 | Pyraclostrobin |
| 11 | b1830 | Trifloxystrobin |
| 11 | b1830 | Bixafen |
| 11 | b1830 | Boscalid |
| 11 | b1830 | Isopyrazam |
| 11 | b1830 | Metalaxyl |
| 11 | b1830 | Penthiopyrad |
| 11 | b1830 | 3-Difluoromethyl-1- |
| | | methyl-1H-pyrazole- |
| | | 4-carboxylic |
| | | acid(2′,4′,5′-trifluoro- |
| | | biphenyl-2-yl)-amide |
| 11 | b1830 | Dimethomorph |
| 11 | b1830 | Difenoconazole |
| 11 | b1830 | Epoxiconazole |
| 11 | b1830 | Fluquinconazole |
| 11 | b1830 | Metconazol |
| 11 | b1830 | Propiconazole |
| 11 | b1830 | Prothioconazole |
| 11 | b1830 | Tebuconazole |
| 11 | b1830 | Triticonazole |
| 11 | b1830 | Prochloraz |
| 11 | b1830 | Carbendazim |
| 11 | b1830 | Cyprodinil |
| 11 | b1830 | Pyrimethanil |
| 11 | b1830 | Fenpropimorph |
| 11 | b1830 | Tridemorph |
| 11 | b1830 | Iprodione |
| 11 | b1830 | 5-ethyl-6-octyl-[1,2,4]triazolo[1, |
| | | 5-a]pyrimidine- |
| | | 7-ylamine |
| 11 | b1830 | Mancozeb |
| 11 | b1830 | Maneb |
| 11 | b1830 | Metiram |
| 11 | b1830 | Dithianon |
| 11 | b1830 | Chlorothalonil |
| 11 | b1830 | ThiophanateMethyl |
| 11 | b1830 | Cymoxanil |
| 11 | b1830 | Metrafenone |
| 11 | b1830 | Acetochlor |
| 11 | b1830 | Dimethenamid |
| 11 | b1830 | Metolachlor |
| 11 | b1830 | Metazachlor |
| 11 | b1830 | Glyphosate |
| 11 | b1830 | Glufosinate |
| 11 | b1830 | Sulfosate |
| 11 | b1830 | Fenoxaprop |
| 11 | b1830 | Paraquat |
| 11 | b1830 | Cycloxydim |
| 11 | b1830 | Profoxydim |
| 11 | b1830 | Sethoxydim |
| 11 | b1830 | Tepraloxydim |
| 11 | b1830 | Pendimethalin |
| 11 | b1830 | Acifluorfen |
| 11 | b1830 | Imazamethabenz |
| 11 | b1830 | Imazamox |
| 11 | b1830 | Imazapic |
| 11 | b1830 | Imazapyr |
| 11 | b1830 | Imazaquin |
| 11 | b1830 | Imazethapyr |
| 11 | b1830 | 2,4-D |
| 11 | b1830 | Chloridazon |
| 11 | b1830 | Picloram |
| 11 | b1830 | Picolinafen |
| 11 | b1830 | Cyclosulfamuron |
| 11 | b1830 | Triflusulfuron |
| 11 | b1830 | Atrazine |
| 11 | b1830 | Pyroxasulfone |
| 11 | b1830 | Bentazone |
| 11 | b1830 | Cinidon-ethly |
| 11 | b1830 | Cinmethylin |
| 11 | b1830 | Dicamba |
| 11 | b1830 | Diflufenzopyr |
| 11 | b1830 | Quinclorac |
| 11 | b1830 | Quinmerac |
| 11 | b1830 | Mesotrione |
| 11 | b1830 | Saflufenacil |
| 11 | b1830 | Topramezone; |
| 12 | b2664 | acephate |
| 12 | b2664 | chlorpyrifos |
| 12 | b2664 | dimethoate |
| 12 | b2664 | methamidophos |
| 12 | b2664 | terbufos |
| 12 | b2664 | aldicarb |
| 12 | b2664 | carbofuran |
| 12 | b2664 | bifenthrin |
| 12 | b2664 | cypermethrin |
| 12 | b2664 | alpha-cypermethrin |
| 12 | b2664 | deltamethrin |
| 12 | b2664 | lambda-cyhalothrin |
| 12 | b2664 | tefluthrin |
| 12 | b2664 | flufenoxuron |
| 12 | b2664 | teflubenzuron |
| 12 | b2664 | spirotetramat; |
| 12 | b2664 | clothianidin |
| 12 | b2664 | imidacloprid |
| 12 | b2664 | thiamethoxam |
| 12 | b2664 | endosulfan |
| 12 | b2664 | fipronil |
| 12 | b2664 | abamectin |
| 12 | b2664 | spinosad |
| 12 | b2664 | spinetoram |
| 12 | b2664 | hydramethylnon; |
| 12 | b2664 | chlorfenapyr; |
| 12 | b2664 | indoxacarb |
| 12 | b2664 | metaflumizone |
| 12 | b2664 | flubendiamide |
| 12 | b2664 | chlorantraniliprole |
| 12 | b2664 | cyazypyr(HGW86) |
| 12 | b2664 | Azoxystrobin |
| 12 | b2664 | Dimoxystrobin |
| 12 | b2664 | Kresoxim-methyl |
| 12 | b2664 | Orysastrobin |
| 12 | b2664 | Pyraclostrobin |
| 12 | b2664 | Trifloxystrobin |
| 12 | b2664 | Bixafen |
| 12 | b2664 | Boscalid |
| 12 | b2664 | Isopyrazam |
| 12 | b2664 | Metalaxyl |
| 12 | b2664 | Penthiopyrad |
| 12 | b2664 | 3-Difluoromethyl-1- |
| | | methyl-1H-pyrazole- |
| | | 4-carboxylic acid(2′, |
| | | 4′,5′-trifluoro- |
| | | biphenyl-2-yl)-amide |
| 12 | b2664 | Dimethomorph |
| 12 | b2664 | Difenoconazole |
| 12 | b2664 | Epoxiconazole |
| 12 | b2664 | Fluquinconazole |
| 12 | b2664 | Metconazol |
| 12 | b2664 | Propiconazole |
| 12 | b2664 | Prothioconazole |
| 12 | b2664 | Tebuconazole |
| 12 | b2664 | Triticonazole |
| 12 | b2664 | Prochloraz |
| 12 | b2664 | Carbendazim |
| 12 | b2664 | Cyprodinil |
| 12 | b2664 | Pyrimethanil |
| 12 | b2664 | Fenpropimorph |
| 12 | b2664 | Tridemorph |
| 12 | b2664 | Iprodione |
| 12 | b2664 | 5-ethyl-6-octyl-[1,2,4]triazolo[1, |
| | | 5-a]pyrimidine- |
| | | 7-ylamine |
| 12 | b2664 | Mancozeb |
| 12 | b2664 | Maneb |
| 12 | b2664 | Metiram |
| 12 | b2664 | Dithianon |
| 12 | b2664 | Chlorothalonil |
| 12 | b2664 | ThiophanateMethyl |
| 12 | b2664 | Cymoxanil |
| 12 | b2664 | Metrafenone |
| 12 | b2664 | Acetochlor |
| 12 | b2664 | Dimethenamid |
| 12 | b2664 | Metolachlor |
| 12 | b2664 | Metazachlor |
| 12 | b2664 | Glyphosate |
| 12 | b2664 | Glufosinate |
| 12 | b2664 | Sulfosate |
| 12 | b2664 | Fenoxaprop |
| 12 | b2664 | Paraquat |
| 12 | b2664 | Cycloxydim |
| 12 | b2664 | Profoxydim |
| 12 | b2664 | Sethoxydim |
| 12 | b2664 | Tepraloxydim |
| 12 | b2664 | Pendimethalin |
| 12 | b2664 | Acifluorfen |
| 12 | b2664 | Imazamethabenz |
| 12 | b2664 | Imazamox |
| 12 | b2664 | Imazapic |
| 12 | b2664 | Imazapyr |
| 12 | b2664 | Imazaquin |
| 12 | b2664 | Imazethapyr |
| 12 | b2664 | 2,4-D |
| 12 | b2664 | Chloridazon |
| 12 | b2664 | Picloram |
| 12 | b2664 | Picolinafen |
| 12 | b2664 | Cyclosulfamuron |
| 12 | b2664 | Triflusulfuron |
| 12 | b2664 | Atrazine |
| 12 | b2664 | Pyroxasulfone |
| 12 | b2664 | Bentazone |
| 12 | b2664 | Cinidon-ethly |
| 12 | b2664 | Cinmethylin |
| 12 | b2664 | Dicamba |
| 12 | b2664 | Diflufenzopyr |
| 12 | b2664 | Quinclorac |
| 12 | b2664 | Quinmerac |
| 12 | b2664 | Mesotrione |
| 12 | b2664 | Saflufenacil |
| 12 | b2664 | Topramezone; |
| 16 | b2796 | acephate |
| 16 | b2796 | chlorpyrifos |
| 16 | b2796 | dimethoate |
| 16 | b2796 | methamidophos |
| 16 | b2796 | terbufos |
| 16 | b2796 | aldicarb |
| 16 | b2796 | carbofuran |
| 16 | b2796 | bifenthrin |
| 16 | b2796 | cypermethrin |
| 16 | b2796 | alpha-cypermethrin |
| 16 | b2796 | deltamethrin |
| 16 | b2796 | lambda-cyhalothrin |
| 16 | b2796 | tefluthrin |
| 16 | b2796 | flufenoxuron |
| 16 | b2796 | teflubenzuron |
| 16 | b2796 | spirotetramat; |
| 16 | b2796 | clothianidin |
| 16 | b2796 | imidacloprid |
| 16 | b2796 | thiamethoxam |
| 16 | b2796 | endosulfan |
| 16 | b2796 | fipronil |
| 16 | b2796 | abamectin |
| 16 | b2796 | spinosad |
| 16 | b2796 | spinetoram |
| 16 | b2796 | hydramethylnon; |
| 16 | b2796 | chlorfenapyr; |
| 16 | b2796 | indoxacarb |
| 16 | b2796 | metaflumizone |
| 16 | b2796 | flubendiamide |
| 16 | b2796 | chlorantraniliprole |
| 16 | b2796 | cyazypyr(HGW86) |
| 16 | b2796 | Azoxystrobin |
| 16 | b2796 | Dimoxystrobin |
| 16 | b2796 | Kresoxim-methyl |
| 16 | b2796 | Orysastrobin |
| 16 | b2796 | Pyraclostrobin |
| 16 | b2796 | Trifloxystrobin |
| 16 | b2796 | Bixafen |
| 16 | b2796 | Boscalid |
| 16 | b2796 | Isopyrazam |
| 16 | b2796 | Metalaxyl |
| 16 | b2796 | Penthiopyrad |
| 16 | b2796 | 3-Difluoromethyl-1- |
| | | methyl-1H-pyrazole- |
| | | 4-carboxylic acid(2′, |
| | | 4′,5′-trifluoro- |
| | | biphenyl-2-yl)-amide |
| 16 | b2796 | Dimethomorph |
| 16 | b2796 | Difenoconazole |
| 16 | b2796 | Epoxiconazole |
| 16 | b2796 | Fluquinconazole |
| 16 | b2796 | Metconazol |
| 16 | b2796 | Propiconazole |
| 16 | b2796 | Prothioconazole |
| 16 | b2796 | Tebuconazole |
| 16 | b2796 | Triticonazole |
| 16 | b2796 | Prochloraz |
| 16 | b2796 | Carbendazim |
| 16 | b2796 | Cyprodinil |
| 16 | b2796 | Pyrimethanil |
| 16 | b2796 | Fenpropimorph |
| 16 | b2796 | Tridemorph |
| 16 | b2796 | Iprodione |
| 16 | b2796 | 5-ethyl-6-octyl-[1,2,4]triazolo[1, |
| | | 5-a]pyrimidine- |
| | | 7-ylamine |
| 16 | b2796 | Mancozeb |
| 16 | b2796 | Maneb |
| 16 | b2796 | Metiram |
| 16 | b2796 | Dithianon |
| 16 | b2796 | Chlorothalonil |
| 16 | b2796 | ThiophanateMethyl |
| 16 | b2796 | Cymoxanil |
| 16 | b2796 | Metrafenone |
| 16 | b2796 | Acetochlor |
| 16 | b2796 | Dimethenamid |
| 16 | b2796 | Metolachlor |
| 16 | b2796 | Metazachlor |
| 16 | b2796 | Glyphosate |
| 16 | b2796 | Glufosinate |
| 16 | b2796 | Sulfosate |
| 16 | b2796 | Fenoxaprop |
| 16 | b2796 | Paraquat |
| 16 | b2796 | Cycloxydim |
| 16 | b2796 | Profoxydim |
| 16 | b2796 | Sethoxydim |
| 16 | b2796 | Tepraloxydim |
| 16 | b2796 | Pendimethalin |
| 16 | b2796 | Acifluorfen |
| 16 | b2796 | Imazamethabenz |
| 16 | b2796 | Imazamox |
| 16 | b2796 | Imazapic |
| 16 | b2796 | Imazapyr |
| 16 | b2796 | Imazaquin |
| 16 | b2796 | Imazethapyr |
| 16 | b2796 | 2,4-D |
| 16 | b2796 | Chloridazon |
| 16 | b2796 | Picloram |
| 16 | b2796 | Picolinafen |
| 16 | b2796 | Cyclosulfamuron |
| 16 | b2796 | Triflusulfuron |
| 16 | b2796 | Atrazine |
| 16 | b2796 | Pyroxasulfone |
| 16 | b2796 | Bentazone |
| 16 | b2796 | Cinidon-ethly |
| 16 | b2796 | Cinmethylin |
| 16 | b2796 | Dicamba |
| 16 | b2796 | Diflufenzopyr |
| 16 | b2796 | Quinclorac |
| 16 | b2796 | Quinmerac |
| 16 | b2796 | Mesotrione |
| 16 | b2796 | Saflufenacil |
| 16 | b2796 | Topramezone; |
| 19 | EST102 | acephate |
| 19 | EST102 | chlorpyrifos |
| 19 | EST102 | dimethoate |
| 19 | EST102 | methamidophos |
| 19 | EST102 | terbufos |
| 19 | EST102 | aldicarb |
| 19 | EST102 | carbofuran |
| 19 | EST102 | bifenthrin |
| 19 | EST102 | cypermethrin |
| 19 | EST102 | alpha-cypermethrin |
| 19 | EST102 | deltamethrin |
| 19 | EST102 | lambda-cyhalothrin |
| 19 | EST102 | tefluthrin |
| 19 | EST102 | flufenoxuron |
| 19 | EST102 | teflubenzuron |
| 19 | EST102 | spirotetramat; |
| 19 | EST102 | clothianidin |
| 19 | EST102 | imidacloprid |
| 19 | EST102 | thiamethoxam |
| 19 | EST102 | endosulfan |
| 19 | EST102 | fipronil |
| 19 | EST102 | abamectin |
| 19 | EST102 | spinosad |
| 19 | EST102 | spinetoram |
| 19 | EST102 | hydramethylnon; |
| 19 | EST102 | chlorfenapyr; |
| 19 | EST102 | indoxacarb |
| 19 | EST102 | metaflumizone |
| 19 | EST102 | flubendiamide |
| 19 | EST102 | chlorantraniliprole |
| 19 | EST102 | cyazypyr(HGW86) |
| 19 | EST102 | Azoxystrobin |
| 19 | EST102 | Dimoxystrobin |
| 19 | EST102 | Kresoxim-methyl |
| 19 | EST102 | Orysastrobin |
| 19 | EST102 | Pyraclostrobin |
| 19 | EST102 | Trifloxystrobin |
| 19 | EST102 | Bixafen |
| 19 | EST102 | Boscalid |
| 19 | EST102 | Isopyrazam |
| 19 | EST102 | Metalaxyl |
| 19 | EST102 | Penthiopyrad |
| 19 | EST102 | 3-Difluoromethyl-1- |
| | | methyl-1H-pyrazole- |
| | | 4-carboxylic |
| | | acid(2′,4′,5′-trifluoro- |
| | | biphenyl-2-yl)-amide |
| 19 | EST102 | Dimethomorph |
| 19 | EST102 | Difenoconazole |
| 19 | EST102 | Epoxiconazole |
| 19 | EST102 | Fluquinconazole |
| 19 | EST102 | Metconazol |
| 19 | EST102 | Propiconazole |
| 19 | EST102 | Prothioconazole |
| 19 | EST102 | Tebuconazole |
| 19 | EST102 | Triticonazole |
| 19 | EST102 | Prochloraz |
| 19 | EST102 | Carbendazim |
| 19 | EST102 | Cyprodinil |
| 19 | EST102 | Pyrimethanil |
| 19 | EST102 | Fenpropimorph |
| 19 | EST102 | Tridemorph |
| 19 | EST102 | Iprodione |
| 19 | EST102 | 5-ethyl-6-octyl-[1,2,4]triazolo[1, |
| | | 5-a]pyrimidine- |
| | | 7-ylamine |
| 19 | EST102 | Mancozeb |
| 19 | EST102 | Maneb |
| 19 | EST102 | Metiram |
| 19 | EST102 | Dithianon |
| 19 | EST102 | Chlorothalonil |
| 19 | EST102 | ThiophanateMethyl |
| 19 | EST102 | Cymoxanil |
| 19 | EST102 | Metrafenone |
| 19 | EST102 | Acetochlor |
| 19 | EST102 | Dimethenamid |
| 19 | EST102 | Metolachlor |
| 19 | EST102 | Metazachlor |
| 19 | EST102 | Glyphosate |
| 19 | EST102 | Glufosinate |
| 19 | EST102 | Sulfosate |
| 19 | EST102 | Fenoxaprop |
| 19 | EST102 | Paraquat |
| 19 | EST102 | Cycloxydim |
| 19 | EST102 | Profoxydim |
| 19 | EST102 | Sethoxydim |
| 19 | EST102 | Tepraloxydim |
| 19 | EST102 | Pendimethalin |
| 19 | EST102 | Acifluorfen |
| 19 | EST102 | Imazamethabenz |
| 19 | EST102 | Imazamox |
| 19 | EST102 | Imazapic |
| 19 | EST102 | Imazapyr |
| 19 | EST102 | Imazaquin |
| 19 | EST102 | Imazethapyr |
| 19 | EST102 | 2,4-D |
| 19 | EST102 | Chloridazon |
| 19 | EST102 | Picloram |
| 19 | EST102 | Picolinafen |
| 19 | EST102 | Cyclosulfamuron |
| 19 | EST102 | Triflusulfuron |
| 19 | EST102 | Atrazine |
| 19 | EST102 | Pyroxasulfone |
| 19 | EST102 | Bentazone |
| 19 | EST102 | Cinidon-ethly |
| 19 | EST102 | Cinmethylin |
| 19 | EST102 | Dicamba |
| 19 | EST102 | Diflufenzopyr |
| 19 | EST102 | Quinclorac |
| 19 | EST102 | Quinmerac |
| 19 | EST102 | Mesotrione |
| 19 | EST102 | Saflufenacil |
| 19 | EST102 | Topramezone; |
| 20 | EST12 | acephate |
| 20 | EST12 | chlorpyrifos |
| 20 | EST12 | dimethoate |
| 20 | EST12 | methamidophos |
| 20 | EST12 | terbufos |
| 20 | EST12 | aldicarb |
| 20 | EST12 | carbofuran |
| 20 | EST12 | bifenthrin |
| 20 | EST12 | cypermethrin |
| 20 | EST12 | alpha-cypermethrin |
| 20 | EST12 | deltamethrin |
| 20 | EST12 | lambda-cyhalothrin |
| 20 | EST12 | tefluthrin |
| 20 | EST12 | flufenoxuron |
| 20 | EST12 | teflubenzuron |
| 20 | EST12 | spirotetramat; |
| 20 | EST12 | clothianidin |
| 20 | EST12 | imidacloprid |
| 20 | EST12 | thiamethoxam |
| 20 | EST12 | endosulfan |
| 20 | EST12 | fipronil |
| 20 | EST12 | abamectin |
| 20 | EST12 | spinosad |
| 20 | EST12 | spinetoram |
| 20 | EST12 | hydramethylnon; |
| 20 | EST12 | chlorfenapyr; |
| 20 | EST12 | indoxacarb |
| 20 | EST12 | metaflumizone |
| 20 | EST12 | flubendiamide |
| 20 | EST12 | chlorantraniliprole |
| 20 | EST12 | cyazypyr(HGW86) |
| 20 | EST12 | Azoxystrobin |
| 20 | EST12 | Dimoxystrobin |
| 20 | EST12 | Kresoxim-methyl |
| 20 | EST12 | Orysastrobin |
| 20 | EST12 | Pyraclostrobin |
| 20 | EST12 | Trifloxystrobin |
| 20 | EST12 | Bixafen |
| 20 | EST12 | Boscalid |
| 20 | EST12 | Isopyrazam |
| 20 | EST12 | Metalaxyl |
| 20 | EST12 | Penthiopyrad |
| 20 | EST12 | 3-Difluoromethyl-1- |
| | | methyl-1H-pyrazole- |
| | | 4-carboxylic |
| | | acid(2′,4′,5′-trifluoro- |
| | | biphenyl-2-yl)-amide |
| 20 | EST12 | Dimethomorph |
| 20 | EST12 | Difenoconazole |
| 20 | EST12 | Epoxiconazole |
| 20 | EST12 | Fluquinconazole |
| 20 | EST12 | Metconazol |
| 20 | EST12 | Propiconazole |
| 20 | EST12 | Prothioconazole |
| 20 | EST12 | Tebuconazole |
| 20 | EST12 | Triticonazole |
| 20 | EST12 | Prochloraz |
| 20 | EST12 | Carbendazim |
| 20 | EST12 | Cyprodinil |
| 20 | EST12 | Pyrimethanil |
| 20 | EST12 | Fenpropimorph |
| 20 | EST12 | Tridemorph |
| 20 | EST12 | Iprodione |
| 20 | EST12 | 5-ethyl-6-octyl-[1,2,4]triazolo[1, |
| | | 5-a]pyrimidine- |
| | | 7-ylamine |
| 20 | EST12 | Mancozeb |
| 20 | EST12 | Maneb |
| 20 | EST12 | Metiram |
| 20 | EST12 | Dithianon |
| 20 | EST12 | Chlorothalonil |
| 20 | EST12 | ThiophanateMethyl |
| 20 | EST12 | Cymoxanil |
| 20 | EST12 | Metrafenone |
| 20 | EST12 | Acetochlor |
| 20 | EST12 | Dimethenamid |
| 20 | EST12 | Metolachlor |
| 20 | EST12 | Metazachlor |
| 20 | EST12 | Glyphosate |
| 20 | EST12 | Glufosinate |
| 20 | EST12 | Sulfosate |
| 20 | EST12 | Fenoxaprop |
| 20 | EST12 | Paraquat |
| 20 | EST12 | Cycloxydim |
| 20 | EST12 | Profoxydim |
| 20 | EST12 | Sethoxydim |
| 20 | EST12 | Tepraloxydim |
| 20 | EST12 | Pendimethalin |
| 20 | EST12 | Acifluorfen |
| 20 | EST12 | Imazamethabenz |
| 20 | EST12 | Imazamox |
| 20 | EST12 | Imazapic |
| 20 | EST12 | Imazapyr |
| 20 | EST12 | Imazaquin |
| 20 | EST12 | Imazethapyr |
| 20 | EST12 | 2,4-D |
| 20 | EST12 | Chloridazon |
| 20 | EST12 | Picloram |
| 20 | EST12 | Picolinafen |
| 20 | EST12 | Cyclosulfamuron |
| 20 | EST12 | Triflusulfuron |
| 20 | EST12 | Atrazine |
| 20 | EST12 | Pyroxasulfone |
| 20 | EST12 | Bentazone |
| 20 | EST12 | Cinidon-ethly |
| 20 | EST12 | Cinmethylin |
| 20 | EST12 | Dicamba |
| 20 | EST12 | Diflufenzopyr |
| 20 | EST12 | Quinclorac |
| 20 | EST12 | Quinmerac |
| 20 | EST12 | Mesotrione |
| 20 | EST12 | Saflufenacil |
| 20 | EST12 | Topramezone; |
| 21 | EST134 | acephate |
| 21 | EST134 | chlorpyrifos |
| 21 | EST134 | dimethoate |
| 21 | EST134 | methamidophos |
| 21 | EST134 | terbufos |
| 21 | EST134 | aldicarb |
| 21 | EST134 | carbofuran |
| 21 | EST134 | bifenthrin |
| 21 | EST134 | cypermethrin |
| 21 | EST134 | alpha-cypermethrin |
| 21 | EST134 | deltamethrin |
| 21 | EST134 | lambda-cyhalothrin |
| 21 | EST134 | tefluthrin |
| 21 | EST134 | flufenoxuron |
| 21 | EST134 | teflubenzuron |
| 21 | EST134 | spirotetramat; |
| 21 | EST134 | clothianidin |
| 21 | EST134 | imidacloprid |
| 21 | EST134 | thiamethoxam |
| 21 | EST134 | endosulfan |
| 21 | EST134 | fipronil |
| 21 | EST134 | abamectin |
| 21 | EST134 | spinosad |
| 21 | EST134 | spinetoram |
| 21 | EST134 | hydramethylnon; |
| 21 | EST134 | chlorfenapyr; |
| 21 | EST134 | indoxacarb |
| 21 | EST134 | metaflumizone |
| 21 | EST134 | flubendiamide |
| 21 | EST134 | chlorantraniliprole |
| 21 | EST134 | cyazypyr(HGW86) |
| 21 | EST134 | Azoxystrobin |
| 21 | EST134 | Dimoxystrobin |
| 21 | EST134 | Kresoxim-methyl |
| 21 | EST134 | Orysastrobin |
| 21 | EST134 | Pyraclostrobin |
| 21 | EST134 | Trifloxystrobin |
| 21 | EST134 | Bixafen |
| 21 | EST134 | Boscalid |
| 21 | EST134 | Isopyrazam |
| 21 | EST134 | Metalaxyl |
| 21 | EST134 | Penthiopyrad |
| 21 | EST134 | 3-Difluoromethyl-1- |
| | | methyl-1H-pyrazole- |
| | | 4-carboxylic |
| | | acid(2′,4′,5′-trifluoro- |
| | | biphenyl-2-yl)-amide |
| 21 | EST134 | Dimethomorph |
| 21 | EST134 | Difenoconazole |
| 21 | EST134 | Epoxiconazole |
| 21 | EST134 | Fluquinconazole |
| 21 | EST134 | Metconazol |
| 21 | EST134 | Propiconazole |
| 21 | EST134 | Prothioconazole |
| 21 | EST134 | Tebuconazole |
| 21 | EST134 | Triticonazole |
| 21 | EST134 | Prochloraz |
| 21 | EST134 | Carbendazim |
| 21 | EST134 | Cyprodinil |
| 21 | EST134 | Pyrimethanil |
| 21 | EST134 | Fenpropimorph |
| 21 | EST134 | Tridemorph |
| 21 | EST134 | Iprodione |
| 21 | EST134 | 5-ethyl-6-octyl-[1,2,4]triazolo[1, |
| | | 5-a]pyrimidine- |
| | | 7-ylamine |
| 21 | EST134 | Mancozeb |
| 21 | EST134 | Maneb |
| 21 | EST134 | Metiram |
| 21 | EST134 | Dithianon |
| 21 | EST134 | Chlorothalonil |
| 21 | EST134 | ThiophanateMethyl |
| 21 | EST134 | Cymoxanil |
| 21 | EST134 | Metrafenone |
| 21 | EST134 | Acetochlor |
| 21 | EST134 | Dimethenamid |
| 21 | EST134 | Metolachlor |
| 21 | EST134 | Metazachlor |
| 21 | EST134 | Glyphosate |
| 21 | EST134 | Glufosinate |
| 21 | EST134 | Sulfosate |
| 21 | EST134 | Fenoxaprop |
| 21 | EST134 | Paraquat |
| 21 | EST134 | Cycloxydim |
| 21 | EST134 | Profoxydim |
| 21 | EST134 | Sethoxydim |
| 21 | EST134 | Tepraloxydim |
| 21 | EST134 | Pendimethalin |
| 21 | EST134 | Acifluorfen |
| 21 | EST134 | Imazamethabenz |
| 21 | EST134 | Imazamox |
| 21 | EST134 | Imazapic |
| 21 | EST134 | Imazapyr |
| 21 | EST134 | Imazaquin |
| 21 | EST134 | Imazethapyr |
| 21 | EST134 | 2,4-D |
| 21 | EST134 | Chloridazon |
| 21 | EST134 | Picloram |
| 21 | EST134 | Picolinafen |
| 21 | EST134 | Cyclosulfamuron |
| 21 | EST134 | Triflusulfuron |
| 21 | EST134 | Atrazine |
| 21 | EST134 | Pyroxasulfone |
| 21 | EST134 | Bentazone |
| 21 | EST134 | Cinidon-ethyl |
| 21 | EST134 | Cinmethylin |
| 21 | EST134 | Dicamba |
| 21 | EST134 | Diflufenzopyr |
| 21 | EST134 | Quinclorac |
| 21 | EST134 | Quinmerac |
| 21 | EST134 | Mesotrione |
| 21 | EST134 | Saflufenacil |
| 21 | EST134 | Topramezone; |
| 23 | EST163 | acephate |
| 23 | EST163 | chlorpyrifos |
| 23 | EST163 | dimethoate |
| 23 | EST163 | methamidophos |
| 23 | EST163 | terbufos |
| 23 | EST163 | aldicarb |
| 23 | EST163 | carbofuran |
| 23 | EST163 | bifenthrin |
| 23 | EST163 | cypermethrin |
| 23 | EST163 | alpha-cypermethrin |
| 23 | EST163 | deltamethrin |
| 23 | EST163 | lambda-cyhalothrin |
| 23 | EST163 | tefluthrin |
| 23 | EST163 | flufenoxuron |
| 23 | EST163 | teflubenzuron |
| 23 | EST163 | spirotetramat; |
| 23 | EST163 | clothianidin |
| 23 | EST163 | imidacloprid |
| 23 | EST163 | thiamethoxam |
| 23 | EST163 | endosulfan |
| 23 | EST163 | fipronil |
| 23 | EST163 | abamectin |
| 23 | EST163 | spinosad |
| 23 | EST163 | spinetoram |
| 23 | EST163 | hydramethylnon; |
| 23 | EST163 | chlorfenapyr; |
| 23 | EST163 | indoxacarb |
| 23 | EST163 | metaflumizone |
| 23 | EST163 | flubendiamide |
| 23 | EST163 | chlorantraniliprole |
| 23 | EST163 | cyazypyr(HGW86) |
| 23 | EST163 | Azoxystrobin |
| 23 | EST163 | Dimoxystrobin |
| 23 | EST163 | Kresoxim-methyl |
| 23 | EST163 | Orysastrobin |
| 23 | EST163 | Pyraclostrobin |
| 23 | EST163 | Trifloxystrobin |
| 23 | EST163 | Bixafen |
| 23 | EST163 | Boscalid |
| 23 | EST163 | Isopyrazam |
| 23 | EST163 | Metalaxyl |
| 23 | EST163 | Penthiopyrad |
| 23 | EST163 | 3-Difluoromethyl-1- |
| | | methyl-1H-pyrazole- |
| | | 4-carboxylic |
| | | acid(2′,4′,5′-trifluoro- |
| | | biphenyl-2-yl)-amide |
| 23 | EST163 | Dimethomorph |
| 23 | EST163 | Difenoconazole |
| 23 | EST163 | Epoxiconazole |
| 23 | EST163 | Fluquinconazole |
| 23 | EST163 | Metconazol |
| 23 | EST163 | Propiconazole |
| 23 | EST163 | Prothioconazole |
| 23 | EST163 | Tebuconazole |
| 23 | EST163 | Triticonazole |
| 23 | EST163 | Prochloraz |
| 23 | EST163 | Carbendazim |
| 23 | EST163 | Cyprodinil |
| 23 | EST163 | Pyrimethanil |
| 23 | EST163 | Fenpropimorph |
| 23 | EST163 | Tridemorph |
| 23 | EST163 | Iprodione |
| 23 | EST163 | 5-ethyl-6-octyl-[1,2,4]triazolo[1, |
| | | 5-a]pyrimidine- |
| | | 7-ylamine |
| 23 | EST163 | Mancozeb |
| 23 | EST163 | Maneb |
| 23 | EST163 | Metiram |
| 23 | EST163 | Dithianon |
| 23 | EST163 | Chlorothalonil |
| 23 | EST163 | ThiophanateMethyl |
| 23 | EST163 | Cymoxanil |
| 23 | EST163 | Metrafenone |
| 23 | EST163 | Acetochlor |
| 23 | EST163 | Dimethenamid |
| 23 | EST163 | Metolachlor |
| 23 | EST163 | Metazachlor |
| 23 | EST163 | Glyphosate |
| 23 | EST163 | Glufosinate |
| 23 | EST163 | Sulfosate |
| 23 | EST163 | Fenoxaprop |
| 23 | EST163 | Paraquat |
| 23 | EST163 | Cycloxydim |
| 23 | EST163 | Profoxydim |
| 23 | EST163 | Sethoxydim |
| 23 | EST163 | Tepraloxydim |
| 23 | EST163 | Pendimethalin |
| 23 | EST163 | Acifluorfen |
| 23 | EST163 | Imazamethabenz |
| 23 | EST163 | Imazamox |
| 23 | EST163 | Imazapic |
| 23 | EST163 | Imazapyr |
| 23 | EST163 | Imazaquin |
| 23 | EST163 | Imazethapyr |
| 23 | EST163 | 2,4-D |
| 23 | EST163 | Chloridazon |
| 23 | EST163 | Picloram |
| 23 | EST163 | Picolinafen |
| 23 | EST163 | Cyclosulfamuron |
| 23 | EST163 | Triflusulfuron |
| 23 | EST163 | Atrazine |
| 23 | EST163 | Pyroxasulfone |
| 23 | EST163 | Bentazone |
| 23 | EST163 | Cinidon-ethly |
| 23 | EST163 | Cinmethylin |
| 23 | EST163 | Dicamba |
| 23 | EST163 | Diflufenzopyr |
| 23 | EST163 | Quinclorac |
| 23 | EST163 | Quinmerac |
| 23 | EST163 | Mesotrione |
| 23 | EST163 | Saflufenacil |
| 23 | EST163 | Topramezone; |
| 25 | EST217 | acephate |
| 25 | EST217 | chlorpyrifos |
| 25 | EST217 | dimethoate |
| 25 | EST217 | methamidophos |
| 25 | EST217 | terbufos |
| 25 | EST217 | aldicarb |
| 25 | EST217 | carbofuran |
| 25 | EST217 | bifenthrin |
| 25 | EST217 | cypermethrin |
| 25 | EST217 | alpha-cypermethrin |
| 25 | EST217 | deltamethrin |
| 25 | EST217 | lambda-cyhalothrin |
| 25 | EST217 | tefluthrin |
| 25 | EST217 | flufenoxuron |
| 25 | EST217 | teflubenzuron |
| 25 | EST217 | spirotetramat; |
| 25 | EST217 | clothianidin |
| 25 | EST217 | imidacloprid |
| 25 | EST217 | thiamethoxam |
| 25 | EST217 | endosulfan |
| 25 | EST217 | fipronil |
| 25 | EST217 | abamectin |
| 25 | EST217 | spinosad |
| 25 | EST217 | spinetoram |
| 25 | EST217 | hydramethylnon; |
| 25 | EST217 | chlorfenapyr; |
| 25 | EST217 | indoxacarb |
| 25 | EST217 | metaflumizone |
| 25 | EST217 | flubendiamide |
| 25 | EST217 | chlorantraniliprole |
| 25 | EST217 | cyazypyr(HGW86) |
| 25 | EST217 | Azoxystrobin |
| 25 | EST217 | Dimoxystrobin |
| 25 | EST217 | Kresoxim-methyl |
| 25 | EST217 | Orysastrobin |
| 25 | EST217 | Pyraclostrobin |
| 25 | EST217 | Trifloxystrobin |
| 25 | EST217 | Bixafen |
| 25 | EST217 | Boscalid |
| 25 | EST217 | Isopyrazam |
| 25 | EST217 | Metalaxyl |
| 25 | EST217 | Penthiopyrad |
| 25 | EST217 | 3-Difluoromethyl-1- |
| | | methyl-1H-pyrazole- |
| | | 4-carboxylic |
| | | acid(2′,4′,5′-trifluoro- |
| | | biphenyl-2-yl)-amide |
| 25 | EST217 | Dimethomorph |
| 25 | EST217 | Difenoconazole |
| 25 | EST217 | Epoxiconazole |
| 25 | EST217 | Fluquinconazole |
| 25 | EST217 | Metconazol |
| 25 | EST217 | Propiconazole |
| 25 | EST217 | Prothioconazole |
| 25 | EST217 | Tebuconazole |
| 25 | EST217 | Triticonazole |
| 25 | EST217 | Prochloraz |
| 25 | EST217 | Carbendazim |
| 25 | EST217 | Cyprodinil |
| 25 | EST217 | Pyrimethanil |
| 25 | EST217 | Fenpropimorph |
| 25 | EST217 | Tridemorph |
| 25 | EST217 | Iprodione |
| 25 | EST217 | 5-ethyl-6-octyl-[1,2,4]triazolo[1, |
| | | 5-a]pyrimidine- |
| | | 7-ylamine |
| 25 | EST217 | Mancozeb |
| 25 | EST217 | Maneb |
| 25 | EST217 | Metiram |
| 25 | EST217 | Dithianon |
| 25 | EST217 | Chlorothalonil |
| 25 | EST217 | ThiophanateMethyl |
| 25 | EST217 | Cymoxanil |
| 25 | EST217 | Metrafenone |
| 25 | EST217 | Acetochlor |
| 25 | EST217 | Dimethenamid |
| 25 | EST217 | Metolachlor |
| 25 | EST217 | Metazachlor |
| 25 | EST217 | Glyphosate |
| 25 | EST217 | Glufosinate |
| 25 | EST217 | Sulfosate |
| 25 | EST217 | Fenoxaprop |
| 25 | EST217 | Paraquat |
| 25 | EST217 | Cycloxydim |
| 25 | EST217 | Profoxydim |
| 25 | EST217 | Sethoxydim |
| 25 | EST217 | Tepraloxydim |
| 25 | EST217 | Pendimethalin |
| 25 | EST217 | Acifluorfen |
| 25 | EST217 | Imazamethabenz |
| 25 | EST217 | Imazamox |
| 25 | EST217 | Imazapic |
| 25 | EST217 | Imazapyr |
| 25 | EST217 | Imazaquin |
| 25 | EST217 | Imazethapyr |
| 25 | EST217 | 2,4-D |
| 25 | EST217 | Chloridazon |
| 25 | EST217 | Picloram |
| 25 | EST217 | Picolinafen |
| 25 | EST217 | Cyclosulfamuron |
| 25 | EST217 | Triflusulfuron |
| 25 | EST217 | Atrazine |
| 25 | EST217 | Pyroxasulfone |
| 25 | EST217 | Bentazone |
| 25 | EST217 | Cinidon-ethly |
| 25 | EST217 | Cinmethylin |
| 25 | EST217 | Dicamba |
| 25 | EST217 | Diflufenzopyr |
| 25 | EST217 | Quinclorac |
| 25 | EST217 | Quinmerac |
| 25 | EST217 | Mesotrione |
| 25 | EST217 | Saflufenacil |
| 25 | EST217 | Topramezone; |
| 27 | EST266 | acephate |
| 27 | EST266 | chlorpyrifos |
| 27 | EST266 | dimethoate |
| 27 | EST266 | methamidophos |
| 27 | EST266 | terbufos |
| 27 | EST266 | aldicarb |
| 27 | EST266 | carbofuran |
| 27 | EST266 | bifenthrin |
| 27 | EST266 | cypermethrin |
| 27 | EST266 | alpha-cypermethrin |
| 27 | EST266 | deltamethrin |
| 27 | EST266 | lambda-cyhalothrin |
| 27 | EST266 | tefluthrin |
| 27 | EST266 | flufenoxuron |
| 27 | EST266 | teflubenzuron |
| 27 | EST266 | spirotetramat; |
| 27 | EST266 | clothianidin |
| 27 | EST266 | imidacloprid |
| 27 | EST266 | thiamethoxam |
| 27 | EST266 | endosulfan |
| 27 | EST266 | fipronil |
| 27 | EST266 | abamectin |
| 27 | EST266 | spinosad |
| 27 | EST266 | spinetoram |
| 27 | EST266 | hydramethylnon; |
| 27 | EST266 | chlorfenapyr; |
| 27 | EST266 | indoxacarb |
| 27 | EST266 | metaflumizone |
| 27 | EST266 | flubendiamide |
| 27 | EST266 | chlorantraniliprole |
| 27 | EST266 | cyazypyr(HGW86) |
| 27 | EST266 | Azoxystrobin |
| 27 | EST266 | Dimoxystrobin |
| 27 | EST266 | Kresoxim-methyl |
| 27 | EST266 | Orysastrobin |
| 27 | EST266 | Pyraclostrobin |
| 27 | EST266 | Trifloxystrobin |
| 27 | EST266 | Bixafen |
| 27 | EST266 | Boscalid |
| 27 | EST266 | Isopyrazam |
| 27 | EST266 | Metalaxyl |
| 27 | EST266 | Penthiopyrad |
| 27 | EST266 | 3-Difluoromethyl-1- |
| | | methyl-1H-pyrazole- |
| | | 4-carboxylic |
| | | acid(2′,4′,5′-trifluoro- |
| | | biphenyl-2-yl)-amide |
| 27 | EST266 | Dimethomorph |
| 27 | EST266 | Difenoconazole |
| 27 | EST266 | Epoxiconazole |
| 27 | EST266 | Fluquinconazole |
| 27 | EST266 | Metconazol |
| 27 | EST266 | Propiconazole |
| 27 | EST266 | Prothioconazole |
| 27 | EST266 | Tebuconazole |
| 27 | EST266 | Triticonazole |
| 27 | EST266 | Prochloraz |
| 27 | EST266 | Carbendazim |
| 27 | EST266 | Cyprodinil |
| 27 | EST266 | Pyrimethanil |
| 27 | EST266 | Fenpropimorph |
| 27 | EST266 | Tridemorph |
| 27 | EST266 | Iprodione |
| 27 | EST266 | 5-ethyl-6-octyl-[1,2,4]triazolo[1, |
| | | 5-a]pyrimidine- |
| | | 7-ylamine |
| 27 | EST266 | Mancozeb |
| 27 | EST266 | Maneb |
| 27 | EST266 | Metiram |
| 27 | EST266 | Dithianon |
| 27 | EST266 | Chlorothalonil |
| 27 | EST266 | ThiophanateMethyl |
| 27 | EST266 | Cymoxanil |
| 27 | EST266 | Metrafenone |
| 27 | EST266 | Acetochlor |
| 27 | EST266 | Dimethenamid |
| 27 | EST266 | Metolachlor |
| 27 | EST266 | Metazachlor |
| 27 | EST266 | Glyphosate |
| 27 | EST266 | Glufosinate |
| 27 | EST266 | Sulfosate |
| 27 | EST266 | Fenoxaprop |
| 27 | EST266 | Paraquat |
| 27 | EST266 | Cycloxydim |
| 27 | EST266 | Profoxydim |
| 27 | EST266 | Sethoxydim |
| 27 | EST266 | Tepraloxydim |
| 27 | EST266 | Pendimethalin |
| 27 | EST266 | Acifluorfen |
| 27 | EST266 | Imazamethabenz |
| 27 | EST266 | Imazamox |
| 27 | EST266 | Imazapic |
| 27 | EST266 | Imazapyr |
| 27 | EST266 | Imazaquin |
| 27 | EST266 | Imazethapyr |
| 27 | EST266 | 2,4-D |
| 27 | EST266 | Chloridazon |
| 27 | EST266 | Picloram |
| 27 | EST266 | Picolinafen |
| 27 | EST266 | Cyclosulfamuron |
| 27 | EST266 | Triflusulfuron |
| 27 | EST266 | Atrazine |
| 27 | EST266 | Pyroxasulfone |
| 27 | EST266 | Bentazone |
| 27 | EST266 | Cinidon-ethly |
| 27 | EST266 | Cinmethylin |
| 27 | EST266 | Dicamba |
| 27 | EST266 | Diflufenzopyr |
| 27 | EST266 | Quinclorac |
| 27 | EST266 | Quinmerac |
| 27 | EST266 | Mesotrione |
| 27 | EST266 | Saflufenacil |
| 27 | EST266 | Topramezone; |
| 28 | EST268 | acephate |
| 28 | EST268 | chlorpyrifos |
| 28 | EST268 | dimethoate |
| 28 | EST268 | methamidophos |
| 28 | EST268 | terbufos |
| 28 | EST268 | aldicarb |
| 28 | EST268 | carbofuran |
| 28 | EST268 | bifenthrin |
| 28 | EST268 | cypermethrin |
| 28 | EST268 | alpha-cypermethrin |
| 28 | EST268 | deltamethrin |
| 28 | EST268 | lambda-cyhalothrin |
| 28 | EST268 | tefluthrin |
| 28 | EST268 | flufenoxuron |
| 28 | EST268 | teflubenzuron |
| 28 | EST268 | spirotetramat; |
| 28 | EST268 | clothianidin |
| 28 | EST268 | imidacloprid |
| 28 | EST268 | thiamethoxam |
| 28 | EST268 | endosulfan |
| 28 | EST268 | fipronil |
| 28 | EST268 | abamectin |
| 28 | EST268 | spinosad |
| 28 | EST268 | spinetoram |
| 28 | EST268 | hydramethylnon; |
| 28 | EST268 | chlorfenapyr; |
| 28 | EST268 | indoxacarb |
| 28 | EST268 | metaflumizone |
| 28 | EST268 | flubendiamide |
| 28 | EST268 | chlorantraniliprole |
| 28 | EST268 | cyazypyr(HGW86) |
| 28 | EST268 | Azoxystrobin |
| 28 | EST268 | Dimoxystrobin |
| 28 | EST268 | Kresoxim-methyl |
| 28 | EST268 | Orysastrobin |
| 28 | EST268 | Pyraclostrobin |
| 28 | EST268 | Trifloxystrobin |
| 28 | EST268 | Bixafen |
| 28 | EST268 | Boscalid |
| 28 | EST268 | Isopyrazam |
| 28 | EST268 | Metalaxyl |
| 28 | EST268 | Penthiopyrad |
| 28 | EST268 | 3-Difluoromethyl-1- |
| | | methyl-1H-pyrazole- |
| | | 4-carboxylic |
| | | acid(2′,4′,5′-trifluoro- |
| | | biphenyl-2-yl)-amide |
| 28 | EST268 | Dimethomorph |
| 28 | EST268 | Difenoconazole |
| 28 | EST268 | Epoxiconazole |
| 28 | EST268 | Fluquinconazole |
| 28 | EST268 | Metconazol |
| 28 | EST268 | Propiconazole |
| 28 | EST268 | Prothioconazole |
| 28 | EST268 | Tebuconazole |
| 28 | EST268 | Triticonazole |
| 28 | EST268 | Prochloraz |
| 28 | EST268 | Carbendazim |
| 28 | EST268 | Cyprodinil |
| 28 | EST268 | Pyrimethanil |
| 28 | EST268 | Fenpropimorph |
| 28 | EST268 | Tridemorph |
| 28 | EST268 | Iprodione |
| 28 | EST268 | 5-ethyl-6-octyl-[1,2,4]triazolo[1, |
| | | 5-a]pyrimidine- |
| | | 7-ylamine |
| 28 | EST268 | Mancozeb |
| 28 | EST268 | Maneb |
| 28 | EST268 | Metiram |
| 28 | EST268 | Dithianon |
| 28 | EST268 | Chlorothalonil |
| 28 | EST268 | ThiophanateMethyl |
| 28 | EST268 | Cymoxanil |
| 28 | EST268 | Metrafenone |
| 28 | EST268 | Acetochlor |
| 28 | EST268 | Dimethenamid |
| 28 | EST268 | Metolachlor |
| 28 | EST268 | Metazachlor |
| 28 | EST268 | Glyphosate |
| 28 | EST268 | Glufosinate |
| 28 | EST268 | Sulfosate |
| 28 | EST268 | Fenoxaprop |
| 28 | EST268 | Paraquat |
| 28 | EST268 | Cycloxydim |
| 28 | EST268 | Profoxydim |
| 28 | EST268 | Sethoxydim |
| 28 | EST268 | Tepraloxydim |
| 28 | EST268 | Pendimethalin |
| 28 | EST268 | Acifluorfen |
| 28 | EST268 | Imazamethabenz |
| 28 | EST268 | Imazamox |
| 28 | EST268 | Imazapic |
| 28 | EST268 | Imazapyr |
| 28 | EST268 | Imazaquin |
| 28 | EST268 | Imazethapyr |
| 28 | EST268 | 2,4-D |
| 28 | EST268 | Chloridazon |
| 28 | EST268 | Picloram |
| 28 | EST268 | Picolinafen |
| 28 | EST268 | Cyclosulfamuron |
| 28 | EST268 | Triflusulfuron |
| 28 | EST268 | Atrazine |
| 28 | EST268 | Pyroxasulfone |
| 28 | EST268 | Bentazone |
| 28 | EST268 | Cinidon-ethly |
| 28 | EST268 | Cinmethylin |
| 28 | EST268 | Dicamba |
| 28 | EST268 | Diflufenzopyr |
| 28 | EST268 | Quinclorac |
| 28 | EST268 | Quinmerac |
| 28 | EST268 | Mesotrione |
| 28 | EST268 | Saflufenacil |
| 28 | EST268 | Topramezone; |
| 30 | EST293 | acephate |
| 30 | EST293 | chlorpyrifos |
| 30 | EST293 | dimethoate |
| 30 | EST293 | methamidophos |
| 30 | EST293 | terbufos |
| 30 | EST293 | aldicarb |
| 30 | EST293 | carbofuran |
| 30 | EST293 | bifenthrin |
| 30 | EST293 | cypermethrin |
| 30 | EST293 | alpha-cypermethrin |
| 30 | EST293 | deltamethrin |
| 30 | EST293 | lambda-cyhalothrin |
| 30 | EST293 | tefluthrin |
| 30 | EST293 | flufenoxuron |
| 30 | EST293 | teflubenzuron |
| 30 | EST293 | spirotetramat; |
| 30 | EST293 | clothianidin |
| 30 | EST293 | imidacloprid |
| 30 | EST293 | thiamethoxam |
| 30 | EST293 | endosulfan |
| 30 | EST293 | fipronil |
| 30 | EST293 | abamectin |
| 30 | EST293 | spinosad |
| 30 | EST293 | spinetoram |
| 30 | EST293 | hydramethylnon; |
| 30 | EST293 | chlorfenapyr; |
| 30 | EST293 | indoxacarb |
| 30 | EST293 | metaflumizone |
| 30 | EST293 | flubendiamide |
| 30 | EST293 | chlorantraniliprole |
| 30 | EST293 | cyazypyr(HGW86) |
| 30 | EST293 | Azoxystrobin |
| 30 | EST293 | Dimoxystrobin |
| 30 | EST293 | Kresoxim-methyl |
| 30 | EST293 | Orysastrobin |
| 30 | EST293 | Pyraclostrobin |
| 30 | EST293 | Trifloxystrobin |
| 30 | EST293 | Bixafen |
| 30 | EST293 | Boscalid |
| 30 | EST293 | Isopyrazam |
| 30 | EST293 | Metalaxyl |
| 30 | EST293 | Penthiopyrad |
| 30 | EST293 | 3-Difluoromethyl-1- |
| | | methyl-1H-pyrazole- |
| | | 4-carboxylic |
| | | acid(2′,4′,5′-trifluoro- |
| | | biphenyl-2-yl)-amide |
| 30 | EST293 | Dimethomorph |
| 30 | EST293 | Difenoconazole |
| 30 | EST293 | Epoxiconazole |
| 30 | EST293 | Fluquinconazole |
| 30 | EST293 | Metconazol |
| 30 | EST293 | Propiconazole |
| 30 | EST293 | Prothioconazole |
| 30 | EST293 | Tebuconazole |
| 30 | EST293 | Triticonazole |
| 30 | EST293 | Prochloraz |
| 30 | EST293 | Carbendazim |
| 30 | EST293 | Cyprodinil |
| 30 | EST293 | Pyrimethanil |
| 30 | EST293 | Fenpropimorph |
| 30 | EST293 | Tridemorph |
| 30 | EST293 | Iprodione |
| 30 | EST293 | 5-ethyl-6-octyl-[1,2,4]triazolo[1, |
| | | 5-a]pyrimidine- |
| | | 7-ylamine |
| 30 | EST293 | Mancozeb |
| 30 | EST293 | Maneb |
| 30 | EST293 | Metiram |
| 30 | EST293 | Dithianon |
| 30 | EST293 | Chlorothalonil |
| 30 | EST293 | ThiophanateMethyl |
| 30 | EST293 | Cymoxanil |
| 30 | EST293 | Metrafenone |
| 30 | EST293 | Acetochlor |
| 30 | EST293 | Dimethenamid |
| 30 | EST293 | Metolachlor |
| 30 | EST293 | Metazachlor |
| 30 | EST293 | Glyphosate |
| 30 | EST293 | Glufosinate |
| 30 | EST293 | Sulfosate |
| 30 | EST293 | Fenoxaprop |
| 30 | EST293 | Paraquat |
| 30 | EST293 | Cycloxydim |
| 30 | EST293 | Profoxydim |
| 30 | EST293 | Sethoxydim |
| 30 | EST293 | Tepraloxydim |
| 30 | EST293 | Pendimethalin |
| 30 | EST293 | Acifluorfen |
| 30 | EST293 | Imazamethabenz |
| 30 | EST293 | Imazamox |
| 30 | EST293 | Imazapic |
| 30 | EST293 | Imazapyr |
| 30 | EST293 | Imazaquin |
| 30 | EST293 | Imazethapyr |
| 30 | EST293 | 2,4-D |
| 30 | EST293 | Chloridazon |
| 30 | EST293 | Picloram |
| 30 | EST293 | Picolinafen |
| 30 | EST293 | Cyclosulfamuron |
| 30 | EST293 | Triflusulfuron |
| 30 | EST293 | Atrazine |
| 30 | EST293 | Pyroxasulfone |
| 30 | EST293 | Bentazone |
| 30 | EST293 | Cinidon-ethly |
| 30 | EST293 | Cinmethylin |
| 30 | EST293 | Dicamba |
| 30 | EST293 | Diflufenzopyr |
| 30 | EST293 | Quinclorac |
| 30 | EST293 | Quinmerac |
| 30 | EST293 | Mesotrione |
| 30 | EST293 | Saflufenacil |
| 30 | EST293 | Topramezone; |
| 31 | EST295 | acephate |
| 31 | EST295 | chlorpyrifos |
| 31 | EST295 | dimethoate |
| 31 | EST295 | methamidophos |
| 31 | EST295 | terbufos |
| 31 | EST295 | aldicarb |
| 31 | EST295 | carbofuran |
| 31 | EST295 | bifenthrin |
| 31 | EST295 | cypermethrin |
| 31 | EST295 | alpha-cypermethrin |
| 31 | EST295 | deltamethrin |
| 31 | EST295 | lambda-cyhalothrin |
| 31 | EST295 | tefluthrin |
| 31 | EST295 | flufenoxuron |
| 31 | EST295 | teflubenzuron |
| 31 | EST295 | spirotetramat; |
| 31 | EST295 | clothianidin |
| 31 | EST295 | imidacloprid |
| 31 | EST295 | thiamethoxam |
| 31 | EST295 | endosulfan |
| 31 | EST295 | fipronil |
| 31 | EST295 | abamectin |
| 31 | EST295 | spinosad |
| 31 | EST295 | spinetoram |
| 31 | EST295 | hydramethylnon; |
| 31 | EST295 | chlorfenapyr; |
| 31 | EST295 | indoxacarb |
| 31 | EST295 | metaflumizone |
| 31 | EST295 | flubendiamide |
| 31 | EST295 | chlorantraniliprole |
| 31 | EST295 | cyazypyr(HGW86) |
| 31 | EST295 | Azoxystrobin |
| 31 | EST295 | Dimoxystrobin |
| 31 | EST295 | Kresoxim-methyl |
| 31 | EST295 | Orysastrobin |
| 31 | EST295 | Pyraclostrobin |
| 31 | EST295 | Trifloxystrobin |
| 31 | EST295 | Bixafen |
| 31 | EST295 | Boscalid |
| 31 | EST295 | Isopyrazam |
| 31 | EST295 | Metalaxyl |
| 31 | EST295 | Penthiopyrad |
| 31 | EST295 | 3-Difluoromethyl-1- |
| | | methyl-1H-pyrazole- |
| | | 4-carboxylic |
| | | acid(2′,4′,5′-trifluoro- |
| | | biphenyl-2-yl)-amide |
| 31 | EST295 | Dimethomorph |
| 31 | EST295 | Difenoconazole |
| 31 | EST295 | Epoxiconazole |
| 31 | EST295 | Fluquinconazole |
| 31 | EST295 | Metconazol |
| 31 | EST295 | Propiconazole |
| 31 | EST295 | Prothioconazole |
| 31 | EST295 | Tebuconazole |
| 31 | EST295 | Triticonazole |
| 31 | EST295 | Prochloraz |
| 31 | EST295 | Carbendazim |
| 31 | EST295 | Cyprodinil |
| 31 | EST295 | Pyrimethanil |
| 31 | EST295 | Fenpropimorph |
| 31 | EST295 | Tridemorph |
| 31 | EST295 | Iprodione |
| 31 | EST295 | 5-ethyl-6-octyl-[1,2,4]triazolo[1, |
| | | 5-a]pyrimidine- |
| | | 7-ylamine |
| 31 | EST295 | Mancozeb |
| 31 | EST295 | Maneb |
| 31 | EST295 | Metiram |
| 31 | EST295 | Dithianon |
| 31 | EST295 | Chlorothalonil |
| 31 | EST295 | ThiophanateMethyl |
| 31 | EST295 | Cymoxanil |
| 31 | EST295 | Metrafenone |
| 31 | EST295 | Acetochlor |
| 31 | EST295 | Dimethenamid |
| 31 | EST295 | Metolachlor |
| 31 | EST295 | Metazachlor |
| 31 | EST295 | Glyphosate |
| 31 | EST295 | Glufosinate |
| 31 | EST295 | Sulfosate |
| 31 | EST295 | Fenoxaprop |
| 31 | EST295 | Paraquat |
| 31 | EST295 | Cycloxydim |
| 31 | EST295 | Profoxydim |
| 31 | EST295 | Sethoxydim |
| 31 | EST295 | Tepraloxydim |
| 31 | EST295 | Pendimethalin |
| 31 | EST295 | Acifluorfen |
| 31 | EST295 | Imazamethabenz |
| 31 | EST295 | Imazamox |
| 31 | EST295 | Imazapic |
| 31 | EST295 | Imazapyr |
| 31 | EST295 | Imazaquin |
| 31 | EST295 | Imazethapyr |
| 31 | EST295 | 2,4-D |
| 31 | EST295 | Chloridazon |
| 31 | EST295 | Picloram |
| 31 | EST295 | Picolinafen |
| 31 | EST295 | Cyclosulfamuron |
| 31 | EST295 | Triflusulfuron |
| 31 | EST295 | Atrazine |
| 31 | EST295 | Pyroxasulfone |
| 31 | EST295 | Bentazone |
| 31 | EST295 | Cinidon-ethly |
| 31 | EST295 | Cinmethylin |
| 31 | EST295 | Dicamba |
| 31 | EST295 | Diflufenzopyr |
| 31 | EST295 | Quinclorac |
| 31 | EST295 | Quinmerac |
| 31 | EST295 | Mesotrione |
| 31 | EST295 | Saflufenacil |
| 31 | EST295 | Topramezone; |
| 33 | EST335 | acephate |
| 33 | EST335 | chlorpyrifos |
| 33 | EST335 | dimethoate |
| 33 | EST335 | methamidophos |
| 33 | EST335 | terbufos |
| 33 | EST335 | aldicarb |
| 33 | EST335 | carbofuran |
| 33 | EST335 | bifenthrin |
| 33 | EST335 | cypermethrin |
| 33 | EST335 | alpha-cypermethrin |
| 33 | EST335 | deltamethrin |
| 33 | EST335 | lambda-cyhalothrin |
| 33 | EST335 | tefluthrin |
| 33 | EST335 | flufenoxuron |
| 33 | EST335 | teflubenzuron |
| 33 | EST335 | spirotetramat; |
| 33 | EST335 | clothianidin |
| 33 | EST335 | imidacloprid |
| 33 | EST335 | thiamethoxam |
| 33 | EST335 | endosulfan |
| 33 | EST335 | fipronil |
| 33 | EST335 | abamectin |
| 33 | EST335 | spinosad |
| 33 | EST335 | spinetoram |
| 33 | EST335 | hydramethylnon; |
| 33 | EST335 | chlorfenapyr; |
| 33 | EST335 | indoxacarb |
| 33 | EST335 | metaflumizone |
| 33 | EST335 | flubendiamide |
| 33 | EST335 | chlorantraniliprole |
| 33 | EST335 | cyazypyr(HGW86) |
| 33 | EST335 | Azoxystrobin |
| 33 | EST335 | Dimoxystrobin |
| 33 | EST335 | Kresoxim-methyl |
| 33 | EST335 | Orysastrobin |
| 33 | EST335 | Pyraclostrobin |
| 33 | EST335 | Trifloxystrobin |
| 33 | EST335 | Bixafen |
| 33 | EST335 | Boscalid |
| 33 | EST335 | Isopyrazam |
| 33 | EST335 | Metalaxyl |
| 33 | EST335 | Penthiopyrad |
| 33 | EST335 | 3-Difluoromethyl-1- |
| | | methyl-1H-pyrazole- |
| | | 4-carboxylic |
| | | acid(2′,4′,5′-trifluoro- |
| | | biphenyl-2-yl)-amide |
| 33 | EST335 | Dimethomorph |
| 33 | EST335 | Difenoconazole |
| 33 | EST335 | Epoxiconazole |
| 33 | EST335 | Fluquinconazole |
| 33 | EST335 | Metconazol |
| 33 | EST335 | Propiconazole |
| 33 | EST335 | Prothioconazole |
| 33 | EST335 | Tebuconazole |
| 33 | EST335 | Triticonazole |
| 33 | EST335 | Prochloraz |
| 33 | EST335 | Carbendazim |
| 33 | EST335 | Cyprodinil |
| 33 | EST335 | Pyrimethanil |
| 33 | EST335 | Fenpropimorph |
| 33 | EST335 | Tridemorph |
| 33 | EST335 | Iprodione |
| 33 | EST335 | 5-ethyl-6-octyl-[1,2,4]triazolo[1, |
| | | 5-a]pyrimidine- |
| | | 7-ylamine |
| 33 | EST335 | Mancozeb |
| 33 | EST335 | Maneb |
| 33 | EST335 | Metiram |
| 33 | EST335 | Dithianon |
| 33 | EST335 | Chlorothalonil |
| 33 | EST335 | ThiophanateMethyl |
| 33 | EST335 | Cymoxanil |
| 33 | EST335 | Metrafenone |
| 33 | EST335 | Acetochlor |
| 33 | EST335 | Dimethenamid |
| 33 | EST335 | Metolachlor |
| 33 | EST335 | Metazachlor |
| 33 | EST335 | Glyphosate |
| 33 | EST335 | Glufosinate |
| 33 | EST335 | Sulfosate |
| 33 | EST335 | Fenoxaprop |
| 33 | EST335 | Paraquat |
| 33 | EST335 | Cycloxydim |
| 33 | EST335 | Profoxydim |
| 33 | EST335 | Sethoxydim |
| 33 | EST335 | Tepraloxydim |
| 33 | EST335 | Pendimethalin |
| 33 | EST335 | Acifluorfen |
| 33 | EST335 | Imazamethabenz |
| 33 | EST335 | Imazamox |
| 33 | EST335 | Imazapic |
| 33 | EST335 | Imazapyr |
| 33 | EST335 | Imazaquin |
| 33 | EST335 | Imazethapyr |
| 33 | EST335 | 2,4-D |
| 33 | EST335 | Chloridazon |
| 33 | EST335 | Picloram |
| 33 | EST335 | Picolinafen |
| 33 | EST335 | Cyclosulfamuron |
| 33 | EST335 | Triflusulfuron |
| 33 | EST335 | Atrazine |
| 33 | EST335 | Pyroxasulfone |
| 33 | EST335 | Bentazone |
| 33 | EST335 | Cinidon-ethly |
| 33 | EST335 | Cinmethylin |
| 33 | EST335 | Dicamba |
| 33 | EST335 | Diflufenzopyr |
| 33 | EST335 | Quinclorac |
| 33 | EST335 | Quinmerac |
| 33 | EST335 | Mesotrione |
| 33 | EST335 | Saflufenacil |
| 33 | EST335 | Topramezone; |
| 37 | EST4 | acephate |
| 37 | EST4 | chlorpyrifos |
| 37 | EST4 | dimethoate |
| 37 | EST4 | methamidophos |
| 37 | EST4 | terbufos |
| 37 | EST4 | aldicarb |
| 37 | EST4 | carbofuran |
| 37 | EST4 | bifenthrin |
| 37 | EST4 | cypermethrin |
| 37 | EST4 | alpha-cypermethrin |
| 37 | EST4 | deltamethrin |
| 37 | EST4 | lambda-cyhalothrin |
| 37 | EST4 | tefluthrin |
| 37 | EST4 | flufenoxuron |
| 37 | EST4 | teflubenzuron |
| 37 | EST4 | spirotetramat; |
| 37 | EST4 | clothianidin |
| 37 | EST4 | imidacloprid |
| 37 | EST4 | thiamethoxam |
| 37 | EST4 | endosulfan |
| 37 | EST4 | fipronil |
| 37 | EST4 | abamectin |
| 37 | EST4 | spinosad |
| 37 | EST4 | spinetoram |
| 37 | EST4 | hydramethylnon; |
| 37 | EST4 | chlorfenapyr; |
| 37 | EST4 | indoxacarb |
| 37 | EST4 | metaflumizone |
| 37 | EST4 | flubendiamide |
| 37 | EST4 | chlorantraniliprole |
| 37 | EST4 | cyazypyr(HGW86) |
| 37 | EST4 | Azoxystrobin |
| 37 | EST4 | Dimoxystrobin |
| 37 | EST4 | Kresoxim-methyl |
| 37 | EST4 | Orysastrobin |
| 37 | EST4 | Pyraclostrobin |
| 37 | EST4 | Trifloxystrobin |
| 37 | EST4 | Bixafen |
| 37 | EST4 | Boscalid |
| 37 | EST4 | Isopyrazam |
| 37 | EST4 | Metalaxyl |
| 37 | EST4 | Penthiopyrad |
| 37 | EST4 | 3-Difluoromethyl-1- |
| | | methyl-1H-pyrazole- |
| | | 4-carboxylic |
| | | acid(2′,4′,5′-trifluoro- |
| | | biphenyl-2-yl)-amide |
| 37 | EST4 | Dimethomorph |
| 37 | EST4 | Difenoconazole |
| 37 | EST4 | Epoxiconazole |
| 37 | EST4 | Fluquinconazole |
| 37 | EST4 | Metconazol |
| 37 | EST4 | Propiconazole |
| 37 | EST4 | Prothioconazole |
| 37 | EST4 | Tebuconazole |
| 37 | EST4 | Triticonazole |
| 37 | EST4 | Prochloraz |
| 37 | EST4 | Carbendazim |
| 37 | EST4 | Cyprodinil |
| 37 | EST4 | Pyrimethanil |
| 37 | EST4 | Fenpropimorph |
| 37 | EST4 | Tridemorph |
| 37 | EST4 | Iprodione |
| 37 | EST4 | 5-ethyl-6-octyl-[1,2,4]triazolo[1, |
| | | 5-a]pyrimidine- |
| | | 7-ylamine |
| 37 | EST4 | Mancozeb |
| 37 | EST4 | Maneb |
| 37 | EST4 | Metiram |
| 37 | EST4 | Dithianon |
| 37 | EST4 | Chlorothalonil |
| 37 | EST4 | ThiophanateMethyl |
| 37 | EST4 | Cymoxanil |
| 37 | EST4 | Metrafenone |
| 37 | EST4 | Acetochlor |
| 37 | EST4 | Dimethenamid |
| 37 | EST4 | Metolachlor |
| 37 | EST4 | Metazachlor |
| 37 | EST4 | Glyphosate |
| 37 | EST4 | Glufosinate |
| 37 | EST4 | Sulfosate |
| 37 | EST4 | Fenoxaprop |
| 37 | EST4 | Paraquat |
| 37 | EST4 | Cycloxydim |
| 37 | EST4 | Profoxydim |
| 37 | EST4 | Sethoxydim |
| 37 | EST4 | Tepraloxydim |
| 37 | EST4 | Pendimethalin |
| 37 | EST4 | Acifluorfen |
| 37 | EST4 | Imazamethabenz |
| 37 | EST4 | Imazamox |
| 37 | EST4 | Imazapic |
| 37 | EST4 | Imazapyr |
| 37 | EST4 | Imazaquin |
| 37 | EST4 | Imazethapyr |
| 37 | EST4 | 2,4-D |
| 37 | EST4 | Chloridazon |
| 37 | EST4 | Picloram |
| 37 | EST4 | Picolinafen |
| 37 | EST4 | Cyclosulfamuron |
| 37 | EST4 | Triflusulfuron |
| 37 | EST4 | Atrazine |
| 37 | EST4 | Pyroxasulfone |
| 37 | EST4 | Bentazone |
| 37 | EST4 | Cinidon-ethly |
| 37 | EST4 | Cinmethylin |
| 37 | EST4 | Dicamba |
| 37 | EST4 | Diflufenzopyr |
| 37 | EST4 | Quinclorac |
| 37 | EST4 | Quinmerac |
| 37 | EST4 | Mesotrione |
| 37 | EST4 | Saflufenacil |
| 37 | EST4 | Topramezone; |
| 39 | EST443 | acephate |
| 39 | EST443 | chlorpyrifos |
| 39 | EST443 | dimethoate |
| 39 | EST443 | methamidophos |
| 39 | EST443 | terbufos |
| 39 | EST443 | aldicarb |
| 39 | EST443 | carbofuran |
| 39 | EST443 | bifenthrin |
| 39 | EST443 | cypermethrin |
| 39 | EST443 | alpha-cypermethrin |
| 39 | EST443 | deltamethrin |
| 39 | EST443 | lambda-cyhalothrin |
| 39 | EST443 | tefluthrin |
| 39 | EST443 | flufenoxuron |
| 39 | EST443 | teflubenzuron |
| 39 | EST443 | spirotetramat; |
| 39 | EST443 | clothianidin |
| 39 | EST443 | imidacloprid |
| 39 | EST443 | thiamethoxam |
| 39 | EST443 | endosulfan |
| 39 | EST443 | fipronil |
| 39 | EST443 | abamectin |
| 39 | EST443 | spinosad |
| 39 | EST443 | spinetoram |
| 39 | EST443 | hydramethylnon; |
| 39 | EST443 | chlorfenapyr; |
| 39 | EST443 | indoxacarb |
| 39 | EST443 | metaflumizone |
| 39 | EST443 | flubendiamide |
| 39 | EST443 | chlorantraniliprole |
| 39 | EST443 | cyazypyr(HGW86) |
| 39 | EST443 | Azoxystrobin |
| 39 | EST443 | Dimoxystrobin |
| 39 | EST443 | Kresoxim-methyl |
| 39 | EST443 | Orysastrobin |
| 39 | EST443 | Pyraclostrobin |
| 39 | EST443 | Trifloxystrobin |
| 39 | EST443 | Bixafen |
| 39 | EST443 | Boscalid |
| 39 | EST443 | Isopyrazam |
| 39 | EST443 | Metalaxyl |
| 39 | EST443 | Penthiopyrad |
| 39 | EST443 | 3-Difluoromethyl-1- |
| | | methyl-1H-pyrazole- |
| | | 4-carboxylic |
| | | acid(2′,4′,5′-trifluoro- |
| | | biphenyl-2-yl)-amide |
| 39 | EST443 | Dimethomorph |
| 39 | EST443 | Difenoconazole |
| 39 | EST443 | Epoxiconazole |
| 39 | EST443 | Fluquinconazole |
| 39 | EST443 | Metconazol |
| 39 | EST443 | Propiconazole |
| 39 | EST443 | Prothioconazole |
| 39 | EST443 | Tebuconazole |
| 39 | EST443 | Triticonazole |
| 39 | EST443 | Prochloraz |
| 39 | EST443 | Carbendazim |
| 39 | EST443 | Cyprodinil |
| 39 | EST443 | Pyrimethanil |
| 39 | EST443 | Fenpropimorph |
| 39 | EST443 | Tridemorph |
| 39 | EST443 | Iprodione |
| 39 | EST443 | 5-ethyl-6-octyl-[1,2,4]triazolo[1, |
| | | 5-a]pyrimidine- |
| | | 7-ylamine |
| 39 | EST443 | Mancozeb |
| 39 | EST443 | Maneb |
| 39 | EST443 | Metiram |
| 39 | EST443 | Dithianon |
| 39 | EST443 | Chlorothalonil |
| 39 | EST443 | ThiophanateMethyl |
| 39 | EST443 | Cymoxanil |
| 39 | EST443 | Metrafenone |
| 39 | EST443 | Acetochlor |
| 39 | EST443 | Dimethenamid |
| 39 | EST443 | Metolachlor |
| 39 | EST443 | Metazachlor |
| 39 | EST443 | Glyphosate |
| 39 | EST443 | Glufosinate |
| 39 | EST443 | Sulfosate |
| 39 | EST443 | Fenoxaprop |
| 39 | EST443 | Paraquat |
| 39 | EST443 | Cycloxydim |
| 39 | EST443 | Profoxydim |
| 39 | EST443 | Sethoxydim |
| 39 | EST443 | Tepraloxydim |
| 39 | EST443 | Pendimethalin |
| 39 | EST443 | Acifluorfen |
| 39 | EST443 | Imazamethabenz |
| 39 | EST443 | Imazamox |
| 39 | EST443 | Imazapic |
| 39 | EST443 | Imazapyr |
| 39 | EST443 | Imazaquin |
| 39 | EST443 | Imazethapyr |
| 39 | EST443 | 2,4-D |
| 39 | EST443 | Chloridazon |
| 39 | EST443 | Picloram |
| 39 | EST443 | Picolinafen |
| 39 | EST443 | Cyclosulfamuron |
| 39 | EST443 | Triflusulfuron |
| 39 | EST443 | Atrazine |
| 39 | EST443 | Pyroxasulfone |
| 39 | EST443 | Bentazone |
| 39 | EST443 | Cinidon-ethly |
| 39 | EST443 | Cinmethylin |
| 39 | EST443 | Dicamba |
| 39 | EST443 | Diflufenzopyr |
| 39 | EST443 | Quinclorac |
| 39 | EST443 | Quinmerac |
| 39 | EST443 | Mesotrione |
| 39 | EST443 | Saflufenacil |
| 39 | EST443 | Topramezone; |
| 40 | EST46 | acephate |
| 40 | EST46 | chlorpyrifos |
| 40 | EST46 | dimethoate |
| 40 | EST46 | methamidophos |
| 40 | EST46 | terbufos |
| 40 | EST46 | aldicarb |
| 40 | EST46 | carbofuran |
| 40 | EST46 | bifenthrin |
| 40 | EST46 | cypermethrin |
| 40 | EST46 | alpha-cypermethrin |
| 40 | EST46 | deltamethrin |
| 40 | EST46 | lambda-cyhalothrin |
| 40 | EST46 | tefluthrin |
| 40 | EST46 | flufenoxuron |
| 40 | EST46 | teflubenzuron |
| 40 | EST46 | spirotetramat; |
| 40 | EST46 | clothianidin |
| 40 | EST46 | imidacloprid |
| 40 | EST46 | thiamethoxam |
| 40 | EST46 | endosulfan |
| 40 | EST46 | fipronil |
| 40 | EST46 | abamectin |
| 40 | EST46 | spinosad |
| 40 | EST46 | spinetoram |
| 40 | EST46 | hydramethylnon; |
| 40 | EST46 | chlorfenapyr; |
| 40 | EST46 | indoxacarb |
| 40 | EST46 | metaflumizone |
| 40 | EST46 | flubendiamide |
| 40 | EST46 | chlorantraniliprole |
| 40 | EST46 | cyazypyr(HGW86) |
| 40 | EST46 | Azoxystrobin |
| 40 | EST46 | Dimoxystrobin |
| 40 | EST46 | Kresoxim-methyl |
| 40 | EST46 | Orysastrobin |
| 40 | EST46 | Pyraclostrobin |
| 40 | EST46 | Trifloxystrobin |
| 40 | EST46 | Bixafen |
| 40 | EST46 | Boscalid |
| 40 | EST46 | Isopyrazam |
| 40 | EST46 | Metalaxyl |
| 40 | EST46 | Penthiopyrad |
| 40 | EST46 | 3-Difluoromethyl-1- |
| | | methyl-1H-pyrazole- |
| | | 4-carboxylic |
| | | acid(2′,4′,5′-trifluoro- |
| | | biphenyl-2-yl)-amide |
| 40 | EST46 | Dimethomorph |
| 40 | EST46 | Difenoconazole |
| 40 | EST46 | Epoxiconazole |
| 40 | EST46 | Fluquinconazole |
| 40 | EST46 | Metconazol |
| 40 | EST46 | Propiconazole |
| 40 | EST46 | Prothioconazole |
| 40 | EST46 | Tebuconazole |
| 40 | EST46 | Triticonazole |
| 40 | EST46 | Prochloraz |
| 40 | EST46 | Carbendazim |
| 40 | EST46 | Cyprodinil |
| 40 | EST46 | Pyrimethanil |
| 40 | EST46 | Fenpropimorph |
| 40 | EST46 | Tridemorph |
| 40 | EST46 | Iprodione |
| 40 | EST46 | 5-ethyl-6-octyl-[1,2,4]triazolo[1, |
| | | 5-a]pyrimidine- |
| | | 7-ylamine |
| 40 | EST46 | Mancozeb |
| 40 | EST46 | Maneb |
| 40 | EST46 | Metiram |
| 40 | EST46 | Dithianon |
| 40 | EST46 | Chlorothalonil |
| 40 | EST46 | ThiophanateMethyl |
| 40 | EST46 | Cymoxanil |
| 40 | EST46 | Metrafenone |
| 40 | EST46 | Acetochlor |
| 40 | EST46 | Dimethenamid |
| 40 | EST46 | Metolachlor |
| 40 | EST46 | Metazachlor |
| 40 | EST46 | Glyphosate |
| 40 | EST46 | Glufosinate |
| 40 | EST46 | Sulfosate |
| 40 | EST46 | Fenoxaprop |
| 40 | EST46 | Paraquat |
| 40 | EST46 | Cycloxydim |
| 40 | EST46 | Profoxydim |
| 40 | EST46 | Sethoxydim |
| 40 | EST46 | Tepraloxydim |
| 40 | EST46 | Pendimethalin |
| 40 | EST46 | Acifluorfen |
| 40 | EST46 | Imazamethabenz |
| 40 | EST46 | Imazamox |
| 40 | EST46 | Imazapic |
| 40 | EST46 | Imazapyr |
| 40 | EST46 | Imazaquin |
| 40 | EST46 | Imazethapyr |
| 40 | EST46 | 2,4-D |
| 40 | EST46 | Chloridazon |
| 40 | EST46 | Picloram |
| 40 | EST46 | Picolinafen |
| 40 | EST46 | Cyclosulfamuron |
| 40 | EST46 | Triflusulfuron |
| 40 | EST46 | Atrazine |
| 40 | EST46 | Pyroxasulfone |
| 40 | EST46 | Bentazone |
| 40 | EST46 | Cinidon-ethly |
| 40 | EST46 | Cinmethylin |
| 40 | EST46 | Dicamba |
| 40 | EST46 | Diflufenzopyr |
| 40 | EST46 | Quinciorac |
| 40 | EST46 | Quinmerac |
| 40 | EST46 | Mesotrione |
| 40 | EST46 | Saflufenacil |
| 40 | EST46 | Topramezone; |
| 42 | EST512 | acephate |
| 42 | EST512 | chlorpyrifos |
| 42 | EST512 | dimethoate |
| 42 | EST512 | methamidophos |
| 42 | EST512 | terbufos |
| 42 | EST512 | aldicarb |
| 42 | EST512 | carbofuran |
| 42 | EST512 | bifenthrin |
| 42 | EST512 | cypermethrin |
| 42 | EST512 | alpha-cypermethrin |
| 42 | EST512 | deltamethrin |
| 42 | EST512 | lambda-cyhalothrin |
| 42 | EST512 | tefluthrin |
| 42 | EST512 | flufenoxuron |
| 42 | EST512 | teflubenzuron |
| 42 | EST512 | spirotetramat; |
| 42 | EST512 | clothianidin |
| 42 | EST512 | imidacloprid |
| 42 | EST512 | thiamethoxam |
| 42 | EST512 | endosulfan |
| 42 | EST512 | fipronil |
| 42 | EST512 | abamectin |
| 42 | EST512 | spinosad |
| 42 | EST512 | spinetoram |
| 42 | EST512 | hydramethylnon; |
| 42 | EST512 | chlorfenapyr; |
| 42 | EST512 | indoxacarb |
| 42 | EST512 | metaflumizone |
| 42 | EST512 | flubendiamide |
| 42 | EST51 2 | chlorantraniliprole |
| 42 | EST512 | cyazypyr(HGW86) |
| 42 | EST512 | Azoxystrobin |
| 42 | EST512 | Dimoxystrobin |
| 42 | EST512 | Kresoxim-methyl |
| 42 | EST512 | Orysastrobin |
| 42 | EST512 | Pyraclostrobin |
| 42 | EST512 | Trifloxystrobin |
| 42 | EST512 | Bixafen |
| 42 | EST512 | Boscalid |
| 42 | EST512 | Isopyrazam |
| 42 | EST512 | Metalaxyl |
| 42 | EST512 | Penthiopyrad |
| 42 | EST512 | 3-Difluoromethyl-1- |
| | | methyl-1H-pyrazole- |
| | | 4-carboxylic |
| | | acid(2′,4′,5′-trifluoro- |
| | | biphenyl-2-yl)-amide |
| 42 | EST512 | Dimethomorph |
| 42 | EST512 | Difenoconazole |
| 42 | EST512 | Epoxiconazole |
| 42 | EST512 | Fluquinconazole |
| 42 | EST512 | Metconazol |
| 42 | EST512 | Propiconazole |
| 42 | EST512 | Prothioconazole |
| 42 | EST512 | Tebuconazole |
| 42 | EST512 | Triticonazole |
| 42 | EST512 | Prochloraz |
| 42 | EST512 | Carbendazim |
| 42 | EST512 | Cyprodinil |
| 42 | EST512 | Pyrimethanil |
| 42 | EST512 | Fenpropimorph |
| 42 | EST512 | Tridemorph |
| 42 | EST512 | Iprodione |
| 42 | EST512 | 5-ethyl-6-octyl-[1,2,4]triazolo[1, |
| | | 5-a]pyrimidine- |
| | | 7-ylamine |
| 42 | EST512 | Mancozeb |
| 42 | EST512 | Maneb |
| 42 | EST512 | Metiram |
| 42 | EST512 | Dithianon |
| 42 | EST512 | Chlorothalonil |
| 42 | EST512 | ThiophanateMethyl |
| 42 | EST512 | Cymoxanil |
| 42 | EST512 | Metrafenone |
| 42 | EST512 | Acetochlor |
| 42 | EST512 | Dimethenamid |
| 42 | EST512 | Metolachlor |
| 42 | EST512 | Metazachlor |
| 42 | EST512 | Glyphosate |
| 42 | EST512 | Glufosinate |
| 42 | EST512 | Sulfosate |
| 42 | EST512 | Fenoxaprop |
| 42 | EST512 | Paraquat |
| 42 | EST512 | Cycloxydim |
| 42 | EST512 | Profoxydim |
| 42 | EST512 | Sethoxydim |
| 42 | EST512 | Tepraloxydim |
| 42 | EST512 | Pendimethalin |
| 42 | EST512 | Acifluorfen |
| 42 | EST512 | Imazamethabenz |
| 42 | EST512 | Imazamox |
| 42 | EST512 | Imazapic |
| 42 | EST512 | Imazapyr |
| 42 | EST512 | Imazaquin |
| 42 | EST512 | Imazethapyr |
| 42 | EST512 | 2,4-D |
| 42 | EST512 | Chloridazon |
| 42 | EST512 | Picloram |
| 42 | EST512 | Picolinafen |
| 42 | EST512 | Cyclosulfamuron |
| 42 | EST512 | Triflusulfuron |
| 42 | EST512 | Atrazine |
| 42 | EST512 | Pyroxasulfone |
| 42 | EST512 | Bentazone |
| 42 | EST512 | Cinidon-ethly |
| 42 | EST512 | Cinmethylin |
| 42 | EST512 | Dicamba |
| 42 | EST512 | Diflufenzopyr |
| 42 | EST512 | Quinclorac |
| 42 | EST512 | Quinmerac |
| 42 | EST512 | Mesotrione |
| 42 | EST512 | Saflufenacil |
| 42 | EST512 | Topramezone; |
| 43 | PpVTP_EST513 | acephate |
| 43 | PpVTP_EST513 | chlorpyrifos |
| 43 | PpVTP_EST513 | dimethoate |
| 43 | PpVTP_EST513 | methamidophos |
| 43 | PpVTP_EST513 | terbufos |
| 43 | PpVTP_EST513 | aldicarb |
| 43 | PpVTP_EST513 | carbofuran |
| 43 | PpVTP_EST513 | bifenthrin |
| 43 | PpVTP_EST513 | cypermethrin |
| 43 | PpVTP_EST513 | alpha-cypermethrin |
| 43 | PpVTP_EST513 | deltamethrin |
| 43 | PpVTP_EST513 | lambda-cyhalothrin |
| 43 | PpVTP_EST513 | tefluthrin |
| 43 | PpVTP_EST513 | flufenoxuron |
| 43 | PpVTP_EST513 | teflubenzuron |
| 43 | PpVTP_EST513 | spirotetramat; |
| 43 | PpVTP_EST513 | clothianidin |
| 43 | PpVTP_EST513 | imidacloprid |
| 43 | PpVTP_EST513 | thiamethoxam |
| 43 | PpVTP_EST513 | endosulfan |
| 43 | PpVTP_EST513 | fipronil |
| 43 | PpVTP_EST513 | abamectin |
| 43 | PpVTP_EST513 | spinosad |
| 43 | PpVTP_EST513 | spinetoram |
| 43 | PpVTP_EST513 | hydramethylnon; |
| 43 | PpVTP_EST513 | chlorfenapyr; |
| 43 | PpVTP_EST513 | indoxacarb |
| 43 | PpVTP_EST513 | metaflumizone |
| 43 | PpVTP_EST513 | flubendiamide |
| 43 | PpVTP_EST513 | chlorantraniliprole |
| 43 | PpVTP_EST513 | cyazypyr(HGW86) |
| 43 | PpVTP_EST513 | Azoxystrobin |
| 43 | PpVTP_EST513 | Dimoxystrobin |
| 43 | PpVTP_EST513 | Kresoxim-methyl |
| 43 | PpVTP_EST513 | Orysastrobin |
| 43 | PpVTP_EST513 | Pyraclostrobin |
| 43 | PpVTP_EST513 | Trifloxystrobin |
| 43 | PpVTP_EST513 | Bixafen |
| 43 | PpVTP_EST513 | Boscalid |
| 43 | PpVTP_EST513 | Isopyrazam |
| 43 | PpVTP_EST513 | Metalaxyl |
| 43 | PpVTP_EST513 | Penthiopyrad |
| 43 | PpVTP_EST513 | 3-Difluoromethyl-1- |
| | | methyl-1H-pyrazole- |
| | | 4-carboxylic |
| | | acid(2′,4′,5′-trifluoro- |
| | | biphenyl-2-yl)-amide |
| 43 | PpVTP_EST513 | Dimethomorph |
| 43 | PpVTP_EST513 | Difenoconazole |
| 43 | PpVTP_EST513 | Epoxiconazole |
| 43 | PpVTP_EST513 | Fluquinconazole |
| 43 | PpVTP_EST513 | Metconazol |
| 43 | PpVTP_EST513 | Propiconazole |
| 43 | PpVTP_EST513 | Prothioconazole |
| 43 | PpVTP_EST513 | Tebuconazole |
| 43 | PpVTP_EST513 | Triticonazole |
| 43 | PpVTP_EST513 | Prochloraz |
| 43 | PpVTP_EST513 | Carbendazim |
| 43 | PpVTP_EST513 | Cyprodinil |
| 43 | PpVTP_EST513 | Pyrimethanil |
| 43 | PpVTP_EST513 | Fenpropimorph |
| 43 | PpVTP_EST513 | Tridemorph |
| 43 | PpVTP_EST513 | Iprodione |
| 43 | PpVTP_EST513 | 5-ethyl-6-octyl-[1,2,4]triazolo[1, |
| | | 5-a]pyrimidine- |
| | | 7-ylamine |
| 43 | PpVTP_EST513 | Mancozeb |
| 43 | PpVTP_EST513 | Maneb |
| 43 | PpVTP_EST513 | Metiram |
| 43 | PpVTP_EST513 | Dithianon |
| 43 | PpVTP_EST513 | Chlorothalonil |
| 43 | PpVTP_EST513 | ThiophanateMethyl |
| 43 | PpVTP_EST513 | Cymoxanil |
| 43 | PpVTP_EST513 | Metrafenone |
| 43 | PpVTP_EST513 | Acetochlor |
| 43 | PpVTP_EST513 | Dimethenamid |
| 43 | PpVTP_EST513 | Metolachlor |
| 43 | PpVTP_EST513 | Metazachlor |
| 43 | PpVTP_EST513 | Glyphosate |
| 43 | PpVTP_EST513 | Glufosinate |
| 43 | PpVTP_EST513 | Sulfosate |
| 43 | PpVTP_EST513 | Fenoxaprop |
| 43 | PpVTP_EST513 | Paraquat |
| 43 | PpVTP_EST513 | Cycloxydim |
| 43 | PpVTP_EST513 | Profoxydim |
| 43 | PpVTP_EST513 | Sethoxydim |
| 43 | PpVTP_EST513 | Tepraloxydim |
| 43 | PpVTP_EST513 | Pendimethalin |
| 43 | PpVTP_EST513 | Acifluorfen |
| 43 | PpVTP_EST513 | Imazamethabenz |
| 43 | PpVTP_EST513 | Imazamox |
| 43 | PpVTP_EST513 | Imazapic |
| 43 | PpVTP_EST513 | Imazapyr |
| 43 | PpVTP_EST513 | Imazaquin |
| 43 | PpVTP_EST513 | Imazethapyr |
| 43 | PpVTP_EST513 | 2,4-D |
| 43 | PpVTP_EST513 | Chloridazon |
| 43 | PpVTP_EST513 | Picloram |
| 43 | PpVTP_EST513 | Picolinafen |
| 43 | PpVTP_EST513 | Cyclosulfamuron |
| 43 | PpVTP_EST513 | Triflusulfuron |
| 43 | PpVTP_EST513 | Atrazine |
| 43 | PpVTP_EST513 | Pyroxasulfone |
| 43 | PpVTP_EST513 | Bentazone |
| 43 | PpVTP_EST513 | Cinidon-ethly |
| 43 | PpVTP_EST513 | Cinmethylin |
| 43 | PpVTP_EST513 | Dicamba |
| 43 | PpVTP_EST513 | Diflufenzopyr |
| 43 | PpVTP_EST513 | Quinclorac |
| 43 | PpVTP_EST513 | Quinmerac |
| 43 | PpVTP_EST513 | Mesotrione |
| 43 | PpVTP_EST513 | Saflufenacil |
| 43 | PpVTP_EST513 | Topramezone; |
| 91 | YKL150w | acephate |
| 91 | YKL150w | chlorpyrifos |
| 91 | YKL150w | dimethoate |
| 91 | YKL150w | methamidophos |
| 91 | YKL150w | terbufos |
| 91 | YKL150w | aldicarb |
| 91 | YKL150w | carbofuran |
| 91 | YKL150w | bifenthrin |
| 91 | YKL150w | cypermethrin |
| 91 | YKL150w | alpha-cypermethrin |
| 91 | YKL150w | deltamethrin |
| 91 | YKL150w | lambda-cyhalothrin |
| 91 | YKL150w | tefluthrin |
| 91 | YKL150w | flufenoxuron |
| 91 | YKL150w | teflubenzuron |
| 91 | YKL150w | spirotetramat; |
| 91 | YKL150w | clothianidin |
| 91 | YKL150w | imidacloprid |
| 91 | YKL150w | thiamethoxam |
| 91 | YKL150w | endosulfan |
| 91 | YKL150w | fipronil |
| 91 | YKL150w | abamectin |
| 91 | YKL150w | spinosad |
| 91 | YKL150w | spinetoram |
| 91 | YKL150w | hydramethylnon; |
| 91 | YKL150w | chlorfenapyr; |
| 91 | YKL150w | indoxacarb |
| 91 | YKL150w | metaflumizone |
| 91 | YKL150w | flubendiamide |
| 91 | YKL150w | chlorantraniliprole |
| 91 | YKL150w | cyazypyr(HGW86) |
| 91 | YKL150w | Azoxystrobin |
| 91 | YKL150w | Dimoxystrobin |
| 91 | YKL150w | Kresoxim-methyl |
| 91 | YKL150w | Orysastrobin |
| 91 | YKL150w | Pyraclostrobin |
| 91 | YKL150w | Trifloxystrobin |
| 91 | YKL150w | Bixafen |
| 91 | YKL150w | Boscalid |
| 91 | YKL150w | Isopyrazam |
| 91 | YKL150w | Metalaxyl |
| 91 | YKL150w | Penthiopyrad |
| 91 | YKL150w | 3-Difluoromethyl-1- |
| | | methyl-1H-pyrazole- |
| | | 4-carboxylic |
| | | acid(2′,4′,5′-trifluoro- |
| | | biphenyl-2-yl)-amide |
| 91 | YKL150w | Dimethomorph |
| 91 | YKL150w | Difenoconazole |
| 91 | YKL150w | Epoxiconazole |
| 91 | YKL150w | Fluquinconazole |
| 91 | YKL150w | Metconazol |
| 91 | YKL150w | Propiconazole |
| 91 | YKL150w | Prothioconazole |
| 91 | YKL150w | Tebuconazole |
| 91 | YKL150w | Triticonazole |
| 91 | YKL150w | Prochloraz |
| 91 | YKL150w | Carbendazim |
| 91 | YKL150w | Cyprodinil |
| 91 | YKL150w | Pyrimethanil |
| 91 | YKL150w | Fenpropimorph |
| 91 | YKL150w | Tridemorph |
| 91 | YKL150w | Iprodione |
| 91 | YKL150w | 5-ethyl-6-octyl-[1,2,4]triazolo[1, |
| | | 5-a]pyrimidine- |
| | | 7-ylamine |
| 91 | YKL150w | Mancozeb |
| 91 | YKL150w | Maneb |
| 91 | YKL150w | Metiram |
| 91 | YKL150w | Dithianon |
| 91 | YKL150w | Chlorothalonil |
| 91 | YKL150w | ThiophanateMethyl |
| 91 | YKL150w | Cymoxanil |
| 91 | YKL150w | Metrafenone |
| 91 | YKL150w | Acetochlor |
| 91 | YKL150w | Dimethenamid |
| 91 | YKL150w | Metolachlor |
| 91 | YKL150w | Metazachlor |
| 91 | YKL150w | Glyphosate |
| 91 | YKL150w | Glufosinate |
| 91 | YKL150w | Sulfosate |
| 91 | YKL150w | Fenoxaprop |
| 91 | YKL150w | Paraquat |
| 91 | YKL150w | Cycloxydim |
| 91 | YKL150w | Profoxydim |
| 91 | YKL150w | Sethoxydim |
| 91 | YKL150w | Tepraloxydim |
| 91 | YKL150w | Pendimethalin |
| 91 | YKL150w | Acifluorfen |
| 91 | YKL150w | Imazamethabenz |
| 91 | YKL150w | Imazamox |
| 91 | YKL150w | Imazapic |
| 91 | YKL150w | Imazapyr |
| 91 | YKL150w | Imazaquin |
| 91 | YKL150w | Imazethapyr |
| 91 | YKL150w | 2,4-D |
| 91 | YKL150w | Chloridazon |
| 91 | YKL150w | Picloram |
| 91 | YKL150w | Picolinafen |
| 91 | YKL150w | Cyclosulfamuron |
| 91 | YKL150w | Triflusulfuron |
| 91 | YKL150w | Atrazine |
| 91 | YKL150w | Pyroxasulfone |
| 91 | YKL150w | Bentazone |
| 91 | YKL150w | Cinidon-ethly |
| 91 | YKL150w | Cinmethylin |
| 91 | YKL150w | Dicamba |
| 91 | YKL150w | Diflufenzopyr |
| 91 | YKL150w | Quinclorac |
| 91 | YKL150w | Quinmerac |
| 91 | YKL150w | Mesotrione |
| 91 | YKL150w | Saflufenacil |
| 91 | YKL150w | Topramezone; |
| 105 | YNL079C | acephate |
| 105 | YNL079C | chlorpyrifos |
| 105 | YNL079C | dimethoate |
| 105 | YNL079C | methamidophos |
| 105 | YNL079C | terbufos |
| 105 | YNL079C | aldicarb |
| 105 | YNL079C | carbofuran |
| 105 | YNL079C | bifenthrin |
| 105 | YNL079C | cypermethrin |
| 105 | YNL079C | alpha-cypermethrin |
| 105 | YNL079C | deltamethrin |
| 105 | YNL079C | lambda-cyhalothrin |
| 105 | YNL079C | tefluthrin |
| 105 | YNL079C | flufenoxuron |
| 105 | YNL079C | teflubenzuron |
| 105 | YNL079C | spirotetramat; |
| 105 | YNL079C | clothianidin |
| 105 | YNL079C | imidacloprid |
| 105 | YNL079C | thiamethoxam |
| 105 | YNL079C | endosulfan |
| 105 | YNL079C | fipronil |
| 105 | YNL079C | abamectin |
| 105 | YNL079C | spinosad |
| 105 | YNL079C | spinetoram |
| 105 | YNL079C | hydramethylnon; |
| 105 | YNL079C | chlorfenapyr; |
| 105 | YNL079C | indoxacarb |
| 105 | YNL079C | metaflumizone |
| 105 | YNL079C | flubendiamide |
| 105 | YNL079C | chlorantraniliprole |
| 105 | YNL079C | cyazypyr(HGW86) |
| 105 | YNL079C | Azoxystrobin |
| 105 | YNL079C | Dimoxystrobin |
| 105 | YNL079C | Kresoxim-methyl |
| 105 | YNL079C | Orysastrobin |
| 105 | YNL079C | Pyraclostrobin |
| 105 | YNL079C | Trifloxystrobin |
| 105 | YNL079C | Bixafen |
| 105 | YNL079C | Boscalid |
| 105 | YNL079C | Isopyrazam |
| 105 | YNL079C | Metalaxyl |
| 105 | YNL079C | Penthiopyrad |
| 105 | YNL079C | 3-Difluoromethyl-1- |
| | | methyl-1H-pyrazole- |
| | | 4-carboxylic |
| | | acid(2′,4′,5′-trifluoro- |
| | | biphenyl-2-yl)-amide |
| 105 | YNL079C | Dimethomorph |
| 105 | YNL079C | Difenoconazole |
| 105 | YNL079C | Epoxiconazole |
| 105 | YNL079C | Fluquinconazole |
| 105 | YNL079C | Metconazol |
| 105 | YNL079C | Propiconazole |
| 105 | YNL079C | Prothioconazole |
| 105 | YNL079C | Tebuconazole |
| 105 | YNL079C | Triticonazole |
| 105 | YNL079C | Prochloraz |
| 105 | YNL079C | Carbendazim |
| 105 | YNL079C | Cyprodinil |
| 105 | YNL079C | Pyrimethanil |
| 105 | YNL079C | Fenpropimorph |
| 105 | YNL079C | Tridemorph |
| 105 | YNL079C | Iprodione |
| 105 | YNL079C | 5-ethyl-6-octyl-[1,2,4]triazolo[1, |
| | | 5-a]pyrimidine- |
| | | 7-ylamine |
| 105 | YNL079C | Mancozeb |
| 105 | YNL079C | Maneb |
| 105 | YNL079C | Metiram |
| 105 | YNL079C | Dithianon |
| 105 | YNL079C | Chlorothalonil |
| 105 | YNL079C | ThiophanateMethyl |
| 105 | YNL079C | Cymoxanil |
| 105 | YNL079C | Metrafenone |
| 105 | YNL079C | Acetochlor |
| 105 | YNL079C | Dimethenamid |
| 105 | YNL079C | Metolachlor |
| 105 | YNL079C | Metazachlor |
| 105 | YNL079C | Glyphosate |
| 105 | YNL079C | Glufosinate |
| 105 | YNL079C | Sulfosate |
| 105 | YNL079C | Fenoxaprop |
| 105 | YNL079C | Paraquat |
| 105 | YNL079C | Cycloxydim |
| 105 | YNL079C | Profoxydim |
| 105 | YNL079C | Sethoxydim |
| 105 | YNL079C | Tepraloxydim |
| 105 | YNL079C | Pendimethalin |
| 105 | YNL079C | Acifluorfen |
| 105 | YNL079C | Imazamethabenz |
| 105 | YNL079C | Imazamox |
| 105 | YNL079C | Imazapic |
| 105 | YNL079C | Imazapyr |
| 105 | YNL079C | Imazaquin |
| 105 | YNL079C | Imazethapyr |
| 105 | YNL079C | 2,4-D |
| 105 | YNL079C | Chloridazon |
| 105 | YNL079C | Picloram |
| 105 | YNL079C | Picolinafen |
| 105 | YNL079C | Cyclosulfamuron |
| 105 | YNL079C | Triflusulfuron |
| 105 | YNL079C | Atrazine |
| 105 | YNL079C | Pyroxasulfone |
| 105 | YNL079C | Bentazone |
| 105 | YNL079C | Cinidon-ethly |
| 105 | YNL079C | Cinmethylin |
| 105 | YNL079C | Dicamba |
| 105 | YNL079C | Diflufenzopyr |
| 105 | YNL079C | Quinclorac |
| 105 | YNL079C | Quinmerac |
| 105 | YNL079C | Mesotrione |
| 105 | YNL079C | Saflufenacil |
| 105 | YNL079C | Topramezone; |
| 107 | YMR100W | acephate |
| 107 | YMR100W | chlorpyrifos |
| 107 | YMR100W | dimethoate |
| 107 | YMR100W | methamidophos |
| 107 | YMR100W | terbufos |
| 107 | YMR100W | aldicarb |
| 107 | YMR100W | carbofuran |
| 107 | YMR100W | bifenthrin |
| 107 | YMR100W | cypermethrin |
| 107 | YMR100W | alpha-cypermethrin |
| 107 | YMR100W | deltamethrin |
| 107 | YMR100W | lambda-cyhalothrin |
| 107 | YMR100W | tefluthrin |
| 107 | YMR100W | flufenoxuron |
| 107 | YMR100W | teflubenzuron |
| 107 | YMR100W | spirotetramat; |
| 107 | YMR100W | clothianidin |
| 107 | YMR100W | imidacloprid |
| 107 | YMR100W | thiamethoxam |
| 107 | YMR100W | endosulfan |
| 107 | YMR100W | fipronil |
| 107 | YMR100W | abamectin |
| 107 | YMR100W | spinosad |
| 107 | YMR100W | spinetoram |
| 107 | YMR100W | hydramethylnon; |
| 107 | YMR100W | chlorfenapyr; |
| 107 | YMR100W | indoxacarb |
| 107 | YMR100W | metaflumizone |
| 107 | YMR100W | flubendiamide |
| 107 | YMR100W | chlorantraniliprole |
| 107 | YMR100W | cyazypyr(HGW86) |
| 107 | YMR100W | Azoxystrobin |
| 107 | YMR100W | Dimoxystrobin |
| 107 | YMR100W | Kresoxim-methyl |
| 107 | YMR100W | Orysastrobin |
| 107 | YMR100W | Pyraclostrobin |
| 107 | YMR100W | Trifloxystrobin |
| 107 | YMR100W | Bixafen |
| 107 | YMR100W | Boscalid |
| 107 | YMR100W | Isopyrazam |
| 107 | YMR100W | Metalaxyl |
| 107 | YMR100W | Penthiopyrad |
| 107 | YMR100W | 3-Difluoromethyl-1- |
| | | methyl-1H-pyrazole- |
| | | 4-carboxylic |
| | | acid(2′,4′,5′-trifluoro- |
| | | biphenyl-2-yl)-amide |
| 107 | YMR100W | Dimethomorph |
| 107 | YMR100W | Difenoconazole |
| 107 | YMR100W | Epoxiconazole |
| 107 | YMR100W | Fluquinconazole |
| 107 | YMR100W | Metconazol |
| 107 | YMR100W | Propiconazole |
| 107 | YMR100W | Prothioconazole |
| 107 | YMR100W | Tebuconazole |
| 107 | YMR100W | Triticonazole |
| 107 | YMR100W | Prochloraz |
| 107 | YMR100W | Carbendazim |
| 107 | YMR100W | Cyprodinil |
| 107 | YMR100W | Pyrimethanil |
| 107 | YMR100W | Fenpropimorph |
| 107 | YMR100W | Tridemorph |
| 107 | YMR100W | Iprodione |
| 107 | YMR100W | 5-ethyl-6-octyl- |
| | | [1,2,4]triazolo[1,5- |
| | | a]pyrimidine-7- |
| | | ylamine |
| 107 | YMR100W | Mancozeb |
| 107 | YMR100W | Maneb |
| 107 | YMR100W | Metiram |
| 107 | YMR100W | Dithianon |
| 107 | YMR100W | Chlorothalonil |
| 107 | YMR100W | ThiophanateMethyl |
| 107 | YMR100W | Cymoxanil |
| 107 | YMR100W | Metrafenone |
| 107 | YMR100W | Acetochlor |
| 107 | YMR100W | Dimethenamid |
| 107 | YMR100W | Metolachlor |
| 107 | YMR100W | Metazachlor |
| 107 | YMR100W | Glyphosate |
| 107 | YMR100W | Glufosinate |
| 107 | YMR100W | Sulfosate |
| 107 | YMR100W | Fenoxaprop |
| 107 | YMR100W | Paraquat |
| 107 | YMR100W | Cycloxydim |
| 107 | YMR100W | Profoxydim |
| 107 | YMR100W | Sethoxydim |
| 107 | YMR100W | Tepraloxydim |
| 107 | YMR100W | Pendimethalin |
| 107 | YMR100W | Acifluorfen |
| 107 | YMR100W | Imazamethabenz |
| 107 | YMR100W | Imazamox |
| 107 | YMR100W | Imazapic |
| 107 | YMR100W | Imazapyr |
| 107 | YMR100W | Imazaquin |
| 107 | YMR100W | Imazethapyr |
| 107 | YMR100W | 2,4-D |
| 107 | YMR100W | Chloridazon |
| 107 | YMR100W | Picloram |
| 107 | YMR100W | Picolinafen |
| 107 | YMR100W | Cyclosulfamuron |
| 107 | YMR100W | Triflusulfuron |
| 107 | YMR100W | Atrazine |
| 107 | YMR100W | Pyroxasulfone |
| 107 | YMR100W | Bentazone |
| 107 | YMR100W | Cinidon-ethly |
| 107 | YMR100W | Cinmethylin |
| 107 | YMR100W | Dicamba |
| 107 | YMR100W | Diflufenzopyr |
| 107 | YMR100W | Quinclorac |
| 107 | YMR100W | Quinmerac |
| 107 | YMR100W | Mesotrione |
| 107 | YMR100W | Saflufenacil |
| 107 | YMR100W | Topramezone; |
| 112 | YNL024c | acephate |
| 112 | YNL024c | chlorpyrifos |
| 112 | YNL024c | dimethoate |
| 112 | YNL024c | methamidophos |
| 112 | YNL024c | terbufos |
| 112 | YNL024c | aldicarb |
| 112 | YNL024c | carbofuran |
| 112 | YNL024c | bifenthrin |
| 112 | YNL024c | cypermethrin |
| 112 | YNL024c | alpha-cypermethrin |
| 112 | YNL024c | deltamethrin |
| 112 | YNL024c | lambda-cyhalothrin |
| 112 | YNL024c | tefluthrin |
| 112 | YNL024c | flufenoxuron |
| 112 | YNL024c | teflubenzuron |
| 112 | YNL024c | spirotetramat; |
| 112 | YNL024c | clothianidin |
| 112 | YNL024c | imidacloprid |
| 112 | YNL024c | thiamethoxam |
| 112 | YNL024c | endosulfan |
| 112 | YNL024c | fipronil |
| 112 | YNL024c | abamectin |
| 112 | YNL024c | spinosad |
| 112 | YNL024c | spinetoram |
| 112 | YNL024c | hydramethylnon; |
| 112 | YNL024c | chlorfenapyr; |
| 112 | YNL024c | indoxacarb |
| 112 | YNL024c | metaflumizone |
| 112 | YNL024c | flubendiamide |
| 112 | YNL024c | chlorantraniliprole |
| 112 | YNL024c | cyazypyr(HGW86) |
| 112 | YNL024c | Azoxystrobin |
| 112 | YNL024c | Dimoxystrobin |
| 112 | YNL024c | Kresoxim-methyl |
| 112 | YNL024c | Orysastrobin |
| 112 | YNL024c | Pyraclostrobin |
| 112 | YNL024c | Trifloxystrobin |
| 112 | YNL024c | Bixafen |
| 112 | YNL024c | Boscalid |
| 112 | YNL024c | Isopyrazam |
| 112 | YNL024c | Metalaxyl |
| 112 | YNL024c | Penthiopyrad |
| 112 | YNL024c | 3-Difluoromethyl-1- |
| | | methyl-1H-pyrazole- |
| | | 4-carboxylic |
| | | acid(2′,4′,5′-trifluoro- |
| | | biphenyl-2-yl)-amide |
| 112 | YNL024c | Dimethomorph |
| 112 | YNL024c | Difenoconazole |
| 112 | YNL024c | Epoxiconazole |
| 112 | YNL024c | Fluquinconazole |
| 112 | YNL024c | Metconazol |
| 112 | YNL024c | Propiconazole |
| 112 | YNL024c | Prothioconazole |
| 112 | YNL024c | Tebuconazole |
| 112 | YNL024c | Triticonazole |
| 112 | YNL024c | Prochloraz |
| 112 | YNL024c | Carbendazim |
| 112 | YNL024c | Cyprodinil |
| 112 | YNL024c | Pyrimethanil |
| 112 | YNL024c | Fenpropimorph |
| 112 | YNL024c | Tridemorph |
| 112 | YNL024c | Iprodione |
| 112 | YNL024c | 5-ethyl-6-octyl-[1,2,4]triazolo[1, |
| | | 5-a]pyrimidine- |
| | | 7-ylamine |
| 112 | YNL024c | Mancozeb |
| 112 | YNL024c | Maneb |
| 112 | YNL024c | Metiram |
| 112 | YNL024c | Dithianon |
| 112 | YNL024c | Chlorothalonil |
| 112 | YNL024c | ThiophanateMethyl |
| 112 | YNL024c | Cymoxanil |
| 112 | YNL024c | Metrafenone |
| 112 | YNL024c | Acetochlor |
| 112 | YNL024c | Dimethenamid |
| 112 | YNL024c | Metolachlor |
| 112 | YNL024c | Metazachlor |
| 112 | YNL024c | Glyphosate |
| 112 | YNL024c | Glufosinate |
| 112 | YNL024c | Sulfosate |
| 112 | YNL024c | Fenoxaprop |
| 112 | YNL024c | Paraquat |
| 112 | YNL024c | Cycloxydim |
| 112 | YNL024c | Profoxydim |
| 112 | YNL024c | Sethoxydim |
| 112 | YNL024c | Tepraloxydim |
| 112 | YNL024c | Pendimethalin |
| 112 | YNL024c | Acifluorfen |
| 112 | YNL024c | Imazamethabenz |
| 112 | YNL024c | Imazamox |
| 112 | YNL024c | Imazapic |
| 112 | YNL024c | Imazapyr |
| 112 | YNL024c | Imazaquin |
| 112 | YNL024c | Imazethapyr |
| 112 | YNL024c | 2,4-D |
| 112 | YNL024c | Chloridazon |
| 112 | YNL024c | Picloram |
| 112 | YNL024c | Picolinafen |
| 112 | YNL024c | Cyclosulfamuron |
| 112 | YNL024c | Triflusulfuron |
| 112 | YNL024c | Atrazine |
| 112 | YNL024c | Pyroxasulfone |
| 112 | YNL024c | Bentazone |
| 112 | YNL024c | Cinidon-ethly |
| 112 | YNL024c | Cinmethylin |
| 112 | YNL024c | Dicamba |
| 112 | YNL024c | Diflufenzopyr |
| 112 | YNL024c | Quinclorac |
| 112 | YNL024c | Quinmerac |
| 112 | YNL024c | Mesotrione |
| 112 | YNL024c | Saflufenacil |
| 112 | YNL024c | Topramezone; |
| 150 | YER174c | acephate |
| 150 | YER174c | chlorpyrifos |
| 150 | YER174c | dimethoate |
| 150 | YER174c | methamidophos |
| 150 | YER174c | terbufos |
| 150 | YER174c | aldicarb |
| 150 | YER174c | carbofuran |
| 150 | YER174c | bifenthrin |
| 150 | YER174c | cypermethrin |
| 150 | YER174c | alpha-cypermethrin |
| 150 | YER174c | deltamethrin |
| 150 | YER174c | lambda-cyhalothrin |
| 150 | YER174c | tefluthrin |
| 150 | YER174c | flufenoxuron |
| 150 | YER174c | teflubenzuron |
| 150 | YER174c | spirotetramat; |
| 150 | YER174c | clothianidin |
| 150 | YER174c | imidacloprid |
| 150 | YER174c | thiamethoxam |
| 150 | YER174c | endosulfan |
| 150 | YER174c | fipronil |
| 150 | YER174c | abamectin |
| 150 | YER174c | spinosad |
| 150 | YER174c | spinetoram |
| 150 | YER174c | hydramethylnon; |
| 150 | YER174c | chlorfenapyr; |
| 150 | YER174c | indoxacarb |
| 150 | YER174c | metaflumizone |
| 150 | YER174c | flubendiamide |
| 150 | YER174c | chlorantraniliprole |
| 150 | YER174c | cyazypyr(HGW86) |
| 150 | YER174c | Azoxystrobin |
| 150 | YER174c | Dimoxystrobin |
| 150 | YER174c | Kresoxim-methyl |
| 150 | YER174c | Orysastrobin |
| 150 | YER174c | Pyraclostrobin |
| 150 | YER174c | Trifloxystrobin |
| 150 | YER174c | Bixafen |
| 150 | YER174c | Boscalid |
| 150 | YER174c | Isopyrazam |
| 150 | YER174c | Metalaxyl |
| 150 | YER174c | Penthiopyrad |
| 150 | YER174c | 3-Difluoromethyl-1- |
| | | methyl-1H-pyrazole- |
| | | 4-carboxylic |
| | | acid(2′,4′,5′-trifluoro- |
| | | biphenyl-2-yl)-amide |
| 150 | YER174c | Dimethomorph |
| 150 | YER174c | Difenoconazole |
| 150 | YER174c | Epoxiconazole |
| 150 | YER174c | Fluquinconazole |
| 150 | YER174c | Metconazol |
| 150 | YER174c | Propiconazole |
| 150 | YER174c | Prothioconazole |
| 150 | YER174c | Tebuconazole |
| 150 | YER174c | Triticonazole |
| 150 | YER174c | Prochloraz |
| 150 | YER174c | Carbendazim |
| 150 | YER174c | Cyprodinil |
| 150 | YER174c | Pyrimethanil |
| 150 | YER174c | Fenpropimorph |
| 150 | YER174c | Tridemorph |
| 150 | YER174c | Iprodione |
| 150 | YER174c | 5-ethyl-6-octyl-[1,2,4]triazolo[1, |
| | | 5-a]pyrimidine- |
| | | 7-ylamine |
| 150 | YER174c | Mancozeb |
| 150 | YER174c | Maneb |
| 150 | YER174c | Metiram |
| 150 | YER174c | Dithianon |
| 150 | YER174c | Chlorothalonil |
| 150 | YER174c | ThiophanateMethyl |
| 150 | YER174c | Cymoxanil |
| 150 | YER174c | Metrafenone |
| 150 | YER174c | Acetochlor |
| 150 | YER174c | Dimethenamid |
| 150 | YER174c | Metolachlor |
| 150 | YER174c | Metazachlor |
| 150 | YER174c | Glyphosate |
| 150 | YER174c | Glufosinate |
| 150 | YER174c | Sulfosate |
| 150 | YER174c | Fenoxaprop |
| 150 | YER174c | Paraquat |
| 150 | YER174c | Cycloxydim |
| 150 | YER174c | Profoxydim |
| 150 | YER174c | Sethoxydim |
| 150 | YER174c | Tepraloxydim |
| 150 | YER174c | Pendimethalin |
| 150 | YER174c | Acifluorfen |
| 150 | YER174c | Imazamethabenz |
| 150 | YER174c | Imazamox |
| 150 | YER174c | Imazapic |
| 150 | YER174c | Imazapyr |
| 150 | YER174c | Imazaquin |
| 150 | YER174c | Imazethapyr |
| 150 | YER174c | 2,4-D |
| 150 | YER174c | Chloridazon |
| 150 | YER174c | Picloram |
| 150 | YER174c | Picolinafen |
| 150 | YER174c | Cyclosulfamuron |
| 150 | YER174c | Triflusulfuron |
| 150 | YER174c | Atrazine |
| 150 | YER174c | Pyroxasulfone |
| 150 | YER174c | Bentazone |
| 150 | YER174c | Cinidon-ethly |
| 150 | YER174c | Cinmethylin |
| 150 | YER174c | Dicamba |
| 150 | YER174c | Diflufenzopyr |
| 150 | YER174c | Quinclorac |
| 150 | YER174c | Quinmerac |
| 150 | YER174c | Mesotrione |
| 150 | YER174c | Saflufenacil |
| 150 | YER174c | Topramezone; |
| 159 | YGR060w | acephate |
| 159 | YGR060w | chlorpyrifos |
| 159 | YGR060w | dimethoate |
| 159 | YGR060w | methamidophos |
| 159 | YGR060w | terbufos |
| 159 | YGR060w | aldicarb |
| 159 | YGR060w | carbofuran |
| 159 | YGR060w | bifenthrin |
| 159 | YGR060w | cypermethrin |
| 159 | YGR060w | alpha-cypermethrin |
| 159 | YGR060w | deltamethrin |
| 159 | YGR060w | lambda-cyhalothrin |
| 159 | YGR060w | tefluthrin |
| 159 | YGR060w | flufenoxuron |
| 159 | YGR060w | teflubenzuron |
| 159 | YGR060w | spirotetramat; |
| 159 | YGR060w | clothianidin |
| 159 | YGR060w | imidacloprid |
| 159 | YGR060w | thiamethoxam |
| 159 | YGR060w | endosulfan |
| 159 | YGR060w | fipronil |
| 159 | YGR060w | abamectin |
| 159 | YGR060w | spinosad |
| 159 | YGR060w | spinetoram |
| 159 | YGR060w | hydramethylnon; |
| 159 | YGR060w | chlorfenapyr; |
| 159 | YGR060w | indoxacarb |
| 159 | YGR060w | metaflumizone |
| 159 | YGR060w | flubendiamide |
| 159 | YGR060w | chlorantraniliprole |
| 159 | YGR060w | cyazypyr(HGW86) |
| 159 | YGR060w | Azoxystrobin |
| 159 | YGR060w | Dimoxystrobin |
| 159 | YGR060w | Kresoxim-methyl |
| 159 | YGR060w | Orysastrobin |
| 159 | YGR060w | Pyraclostrobin |
| 159 | YGR060w | Trifloxystrobin |
| 159 | YGR060w | Bixafen |
| 159 | YGR060w | Boscalid |
| 159 | YGR060w | Isopyrazam |
| 159 | YGR060w | Metalaxyl |
| 159 | YGR060w | Penthiopyrad |
| 159 | YGR060w | 3-Difluoromethyl-1- |
| | | methyl-1H-pyrazole- |
| | | 4-carboxylic |
| | | acid(2′,4′,5′-trifluoro- |
| | | biphenyl-2-yl)-amide |
| 159 | YGR060w | Dimethomorph |
| 159 | YGR060w | Difenoconazole |
| 159 | YGR060w | Epoxiconazole |
| 159 | YGR060w | Fluquinconazole |
| 159 | YGR060w | Metconazol |
| 159 | YGR060w | Propiconazole |
| 159 | YGR060w | Prothioconazole |
| 159 | YGR060w | Tebuconazole |
| 159 | YGR060w | Triticonazole |
| 159 | YGR060w | Prochloraz |
| 159 | YGR060w | Carbendazim |
| 159 | YGR060w | Cyprodinil |
| 159 | YGR060w | Pyrimethanil |
| 159 | YGR060w | Fenpropimorph |
| 159 | YGR060w | Tridemorph |
| 159 | YGR060w | Iprodione |
| 159 | YGR060w | 5-ethyl-6-octyl-[1,2,4]triazolo[1, |
| | | 5-a]pyrimidine- |
| | | 7-ylamine |
| 159 | YGR060w | Mancozeb |
| 159 | YGR060w | Maneb |
| 159 | YGR060w | Metiram |
| 159 | YGR060w | Dithianon |
| 159 | YGR060w | Chlorothalonil |
| 159 | YGR060w | ThiophanateMethyl |
| 159 | YGR060w | Cymoxanil |
| 159 | YGR060w | Metrafenone |
| 159 | YGR060w | Acetochlor |
| 159 | YGR060w | Dimethenamid |
| 159 | YGR060w | Metolachlor |
| 159 | YGR060w | Metazachlor |
| 159 | YGR060w | Glyphosate |
| 159 | YGR060w | Glufosinate |
| 159 | YGR060w | Sulfosate |
| 159 | YGR060w | Fenoxaprop |
| 159 | YGR060w | Paraquat |
| 159 | YGR060w | Cycloxydim |
| 159 | YGR060w | Profoxydim |
| 159 | YGR060w | Sethoxydim |
| 159 | YGR060w | Tepraloxydim |
| 159 | YGR060w | Pendimethalin |
| 159 | YGR060w | Acifluorfen |
| 159 | YGR060w | Imazamethabenz |
| 159 | YGR060w | Imazamox |
| 159 | YGR060w | Imazapic |
| 159 | YGR060w | Imazapyr |
| 159 | YGR060w | Imazaquin |
| 159 | YGR060w | Imazethapyr |
| 159 | YGR060w | 2,4-D |
| 159 | YGR060w | Chloridazon |
| 159 | YGR060w | Picloram |
| 159 | YGR060w | Picolinafen |
| 159 | YGR060w | Cyclosulfamuron |
| 159 | YGR060w | Triflusulfuron |
| 159 | YGR060w | Atrazine |
| 159 | YGR060w | Pyroxasulfone |
| 159 | YGR060w | Bentazone |
| 159 | YGR060w | Cinidon-ethly |
| 159 | YGR060w | Cinmethylin |
| 159 | YGR060w | Dicamba |
| 159 | YGR060w | Diflufenzopyr |
| 159 | YGR060w | Quinclorac |
| 159 | YGR060w | Quinmerac |
| 159 | YGR060w | Mesotrione |
| 159 | YGR060w | Saflufenacil |
| 159 | YGR060w | Topramezone; |
| 164 | ROB5 | acephate |
| 164 | ROB5 | chlorpyrifos |
| 164 | ROB5 | dimethoate |
| 164 | ROB5 | methamidophos |
| 164 | ROB5 | terbufos |
| 164 | ROB5 | aldicarb |
| 164 | ROB5 | carbofuran |
| 164 | ROB5 | bifenthrin |
| 164 | ROB5 | cypermethrin |
| 164 | ROB5 | alpha-cypermethrin |
| 164 | ROB5 | deltamethrin |
| 164 | ROB5 | lambda-cyhalothrin |
| 164 | ROB5 | tefluthrin |
| 164 | ROB5 | flufenoxuron |
| 164 | ROB5 | teflubenzuron |
| 164 | ROB5 | spirotetramat; |
| 164 | ROB5 | clothianidin |
| 164 | ROB5 | imidacloprid |
| 164 | ROB5 | thiamethoxam |
| 164 | ROB5 | endosulfan |
| 164 | ROB5 | fipronil |
| 164 | ROB5 | abamectin |
| 164 | ROB5 | spinosad |
| 164 | ROB5 | spinetoram |
| 164 | ROB5 | hydramethylnon; |
| 164 | ROB5 | chlorfenapyr; |
| 164 | ROB5 | indoxacarb |
| 164 | ROB5 | metaflumizone |
| 164 | ROB5 | flubendiamide |
| 164 | ROB5 | chlorantraniliprole |
| 164 | ROB5 | cyazypyr(HGW86) |
| 164 | ROB5 | Azoxystrobin |
| 164 | ROB5 | Dimoxystrobin |
| 164 | ROB5 | Kresoxim-methyl |
| 164 | ROB5 | Orysastrobin |
| 164 | ROB5 | Pyraclostrobin |
| 164 | ROB5 | Trifloxystrobin |
| 164 | ROB5 | Bixafen |
| 164 | ROB5 | Boscalid |
| 164 | ROB5 | Isopyrazam |
| 164 | ROB5 | Metalaxyl |
| 164 | ROB5 | Penthiopyrad |
| 164 | ROB5 | 3-Difluoromethyl-1- |
| | | methyl-1H-pyrazole- |
| | | 4-carboxylic |
| | | acid(2′,4′,5′-trifluoro- |
| | | biphenyl-2-yl)-amide |
| 164 | ROB5 | Dimethomorph |
| 164 | ROB5 | Difenoconazole |
| 164 | ROB5 | Epoxiconazole |
| 164 | ROB5 | Fluquinconazole |
| 164 | ROB5 | Metconazol |
| 164 | ROB5 | Propiconazole |
| 164 | ROB5 | Prothioconazole |
| 164 | ROB5 | Tebuconazole |
| 164 | ROB5 | Triticonazole |
| 164 | ROB5 | Prochloraz |
| 164 | ROB5 | Carbendazim |
| 164 | ROB5 | Cyprodinil |
| 164 | ROB5 | Pyrimethanil |
| 164 | ROB5 | Fenpropimorph |
| 164 | ROB5 | Tridemorph |
| 164 | ROB5 | Iprodione |
| 164 | ROB5 | 5-ethyl-6-octyl-[1,2,4]triazolo[1, |
| | | 5-a]pyrimidine- |
| | | 7-ylamine |
| 164 | ROB5 | Mancozeb |
| 164 | ROB5 | Maneb |
| 164 | ROB5 | Metiram |
| 164 | ROB5 | Dithianon |
| 164 | ROB5 | Chlorothalonil |
| 164 | ROB5 | ThiophanateMethyl |
| 164 | ROB5 | Cymoxanil |
| 164 | ROB5 | Metrafenone |
| 164 | ROB5 | Acetochlor |
| 164 | ROB5 | Dimethenamid |
| 164 | ROB5 | Metolachlor |
| 164 | ROB5 | Metazachlor |
| 164 | ROB5 | Glyphosate |
| 164 | ROB5 | Glufosinate |
| 164 | ROB5 | Sulfosate |
| 164 | ROB5 | Fenoxaprop |
| 164 | ROB5 | Paraquat |
| 164 | ROB5 | Cycloxydim |
| 164 | ROB5 | Profoxydim |
| 164 | ROB5 | Sethoxydim |
| 164 | ROB5 | Tepraloxydim |
| 164 | ROB5 | Pendimethalin |
| 164 | ROB5 | Acifluorfen |
| 164 | ROB5 | Imazamethabenz |
| 164 | ROB5 | Imazamox |
| 164 | ROB5 | Imazapic |
| 164 | ROB5 | Imazapyr |
| 164 | ROB5 | Imazaquin |
| 164 | ROB5 | Imazethapyr |
| 164 | ROB5 | 2,4-D |
| 164 | ROB5 | Chloridazon |
| 164 | ROB5 | Picloram |
| 164 | ROB5 | Picolinafen |
| 164 | ROB5 | Cyclosulfamuron |
| 164 | ROB5 | Triflusulfuron |
| 164 | ROB5 | Atrazine |
| 164 | ROB5 | Pyroxasulfone |
| 164 | ROB5 | Bentazone |
| 164 | ROB5 | Cinidon-ethly |
| 164 | ROB5 | Cinmethylin |
| 164 | ROB5 | Dicamba |
| 164 | ROB5 | Diflufenzopyr |
| 164 | ROB5 | Quinclorac |
| 164 | ROB5 | Quinmerac |
| 164 | ROB5 | Mesotrione |
| 164 | ROB5 | Saflufenacil |
| 164 | ROB5 | Topramezone; |
| 165 | GOICDS_CDS0012 | acephate |
| 165 | GOICDS_CDS0012 | chlorpyrifos |
| 165 | GOICDS_CDS0012 | dimethoate |
| 165 | GOICDS_CDS0012 | methamidophos |
| 165 | GOICDS_CDS0012 | terbufos |
| 165 | GOICDS_CDS0012 | aldicarb |
| 165 | GOICDS_CDS0012 | carbofuran |
| 165 | GOICDS_CDS0012 | bifenthrin |
| 165 | GOICDS_CDS0012 | cypermethrin |
| 165 | GOICDS_CDS0012 | alpha-cypermethrin |
| 165 | GOICDS_CDS0012 | deltamethrin |
| 165 | GOICDS_CDS0012 | lambda-cyhalothrin |
| 165 | GOICDS_CDS0012 | tefluthrin |
| 165 | GOICDS_CDS0012 | flufenoxuron |
| 165 | GOICDS_CDS0012 | teflubenzuron |
| 165 | GOICDS_CDS0012 | spirotetramat; |
| 165 | GOICDS_CDS0012 | clothianidin |
| 165 | GOICDS_CDS0012 | imidacloprid |
| 165 | GOICDS_CDS0012 | thiamethoxam |
| 165 | GOICDS_CDS0012 | endosulfan |
| 165 | GOICDS_CDS0012 | fipronil |
| 165 | GOICDS_CDS0012 | abamectin |
| 165 | GOICDS_CDS0012 | spinosad |
| 165 | GOICDS_CDS0012 | spinetoram |
| 165 | GOICDS_CDS0012 | hydramethylnon; |
| 165 | GOICDS_CDS0012 | chlorfenapyr; |
| 165 | GOICDS_CDS0012 | indoxacarb |
| 165 | GOICDS_CDS0012 | metaflumizone |
| 165 | GOICDS_CDS0012 | flubendiamide |
| 165 | GOICDS_CDS0012 | chlorantraniliprole |
| 165 | GOICDS_CDS0012 | cyazypyr(HGW86) |
| 165 | GOICDS_CDS0012 | Azoxystrobin |
| 165 | GOICDS_CDS0012 | Dimoxystrobin |
| 165 | GOICDS_CDS0012 | Kresoxim-methyl |
| 165 | GOICDS_CDS0012 | Orysastrobin |
| 165 | GOICDS_CDS0012 | Pyraclostrobin |
| 165 | GOICDS_CDS0012 | Trifloxystrobin |
| 165 | GOICDS_CDS0012 | Bixafen |
| 165 | GOICDS_CDS0012 | Boscalid |
| 165 | GOICDS_CDS0012 | Isopyrazam |
| 165 | GOICDS_CDS0012 | Metalaxyl |
| 165 | GOICDS_CDS0012 | Penthiopyrad |
| 165 | GOICDS_CDS0012 | 3-Difluoromethyl-1- |
| | | methyl-1H-pyrazole- |
| | | 4-carboxylic |
| | | acid(2′,4′,5′-trifluoro- |
| | | biphenyl-2-yl)-amide |
| 165 | GOICDS_CDS0012 | Dimethomorph |
| 165 | GOICDS_CDS0012 | Difenoconazole |
| 165 | GOICDS_CDS0012 | Epoxiconazole |
| 165 | GOICDS_CDS0012 | Fluquinconazole |
| 165 | GOICDS_CDS0012 | Metconazol |
| 165 | GOICDS_CDS0012 | Propiconazole |
| 165 | GOICDS_CDS0012 | Prothioconazole |
| 165 | GOICDS_CDS0012 | Tebuconazole |
| 165 | GOICDS_CDS0012 | Triticonazole |
| 165 | GOICDS_CDS0012 | Prochloraz |
| 165 | GOICDS_CDS0012 | Carbendazim |
| 165 | GOICDS_CDS0012 | Cyprodinil |
| 165 | GOICDS_CDS0012 | Pyrimethanil |
| 165 | GOICDS_CDS0012 | Fenpropimorph |
| 165 | GOICDS_CDS0012 | Tridemorph |
| 165 | GOICDS_CDS0012 | Iprodione |
| 165 | GOICDS_CDS0012 | 5-ethyl-6-octyl-[1,2,4]triazolo[1, |
| | | 5-a]pyrimidine- |
| | | 7-ylamine |
| 165 | GOICDS_CDS0012 | Mancozeb |
| 165 | GOICDS_CDS0012 | Maneb |
| 165 | GOICDS_CDS0012 | Metiram |
| 165 | GOICDS_CDS0012 | Dithianon |
| 165 | GOICDS_CDS0012 | Chlorothalonil |
| 165 | GOICDS_CDS0012 | ThiophanateMethyl |
| 165 | GOICDS_CDS0012 | Cymoxanil |
| 165 | GOICDS_CDS0012 | Metrafenone |
| 165 | GOICDS_CDS0012 | Acetochlor |
| 165 | GOICDS_CDS0012 | Dimethenamid |
| 165 | GOICDS_CDS0012 | Metolachlor |
| 165 | GOICDS_CDS0012 | Metazachlor |
| 165 | GOICDS_CDS0012 | Glyphosate |
| 165 | GOICDS_CDS0012 | Glufosinate |
| 165 | GOICDS_CDS0012 | Sulfosate |
| 165 | GOICDS_CDS0012 | Fenoxaprop |
| 165 | GOICDS_CDS0012 | Paraquat |
| 165 | GOICDS_CDS0012 | Cycloxydim |
| 165 | GOICDS_CDS0012 | Profoxydim |
| 165 | GOICDS_CDS0012 | Sethoxydim |
| 165 | GOICDS_CDS0012 | Tepraloxydim |
| 165 | GOICDS_CDS0012 | Pendimethalin |
| 165 | GOICDS_CDS0012 | Acifluorfen |
| 165 | GOICDS_CDS0012 | Imazamethabenz |
| 165 | GOICDS_CDS0012 | Imazamox |
| 165 | GOICDS_CDS0012 | Imazapic |
| 165 | GOICDS_CDS0012 | Imazapyr |
| 165 | GOICDS_CDS0012 | Imazaquin |
| 165 | GOICDS_CDS0012 | Imazethapyr |
| 165 | GOICDS_CDS0012 | 2,4-D |
| 165 | GOICDS_CDS0012 | Chloridazon |
| 165 | GOICDS_CDS0012 | Picloram |
| 165 | GOICDS_CDS0012 | Picolinafen |
| 165 | GOICDS_CDS0012 | Cyclosulfamuron |
| 165 | GOICDS_CDS0012 | Triflusulfuron |
| 165 | GOICDS_CDS0012 | Atrazine |
| 165 | GOICDS_CDS0012 | Pyroxasulfone |
| 165 | GOICDS_CDS0012 | Bentazone |
| 165 | GOICDS_CDS0012 | Cinidon-ethly |
| 165 | GOICDS_CDS0012 | Cinmethylin |
| 165 | GOICDS_CDS0012 | Dicamba |
| 165 | GOICDS_CDS0012 | Diflufenzopyr |
| 165 | GOICDS_CDS0012 | Quinclorac |
| 165 | GOICDS_CDS0012 | Quinmerac |
| 165 | GOICDS_CDS0012 | Mesotrione |
| 165 | GOICDS_CDS0012 | Saflufenacil |
| 165 | GOICDS_CDS0012 | Topramezone; |
| 166 | GOICDS_CDS0045 | acephate |
| 166 | GOICDS_CDS0045 | chlorpyrifos |
| 166 | GOICDS_CDS0045 | dimethoate |
| 166 | GOICDS_CDS0045 | methamidophos |
| 166 | GOICDS_CDS0045 | terbufos |
| 166 | GOICDS_CDS0045 | aldicarb |
| 166 | GOICDS_CDS0045 | carbofuran |
| 166 | GOICDS_CDS0045 | bifenthrin |
| 166 | GOICDS_CDS0045 | cypermethrin |
| 166 | GOICDS_CDS0045 | alpha-cypermethrin |
| 166 | GOICDS_CDS0045 | deltamethrin |
| 166 | GOICDS_CDS0045 | lambda-cyhalothrin |
| 166 | GOICDS_CDS0045 | tefluthrin |
| 166 | GOICDS_CDS0045 | flufenoxuron |
| 166 | GOICDS_CDS0045 | teflubenzuron |
| 166 | GOICDS_CDS0045 | spirotetramat; |
| 166 | GOICDS_CDS0045 | clothianidin |
| 166 | GOICDS_CDS0045 | imidacloprid |
| 166 | GOICDS_CDS0045 | thiamethoxam |
| 166 | GOICDS_CDS0045 | endosulfan |
| 166 | GOICDS_CDS0045 | fipronil |
| 166 | GOICDS_CDS0045 | abamectin |
| 166 | GOICDS_CDS0045 | spinosad |
| 166 | GOICDS_CDS0045 | spinetoram |
| 166 | GOICDS_CDS0045 | hydramethylnon; |
| 166 | GOICDS_CDS0045 | chlorfenapyr; |
| 166 | GOICDS_CDS0045 | indoxacarb |
| 166 | GOICDS_CDS0045 | metaflumizone |
| 166 | GOICDS_CDS0045 | flubendiamide |
| 166 | GOICDS_CDS0045 | chlorantraniliprole |
| 166 | GOICDS_CDS0045 | cyazypyr(HGW86) |
| 166 | GOICDS_CDS0045 | Azoxystrobin |
| 166 | GOICDS_CDS0045 | Dimoxystrobin |
| 166 | GOICDS_CDS0045 | Kresoxim-methyl |
| 166 | GOICDS_CDS0045 | Orysastrobin |
| 166 | GOICDS_CDS0045 | Pyraclostrobin |
| 166 | GOICDS_CDS0045 | Trifloxystrobin |
| 166 | GOICDS_CDS0045 | Bixafen |
| 166 | GOICDS_CDS0045 | Boscalid |
| 166 | GOICDS_CDS0045 | Isopyrazam |
| 166 | GOICDS_CDS0045 | Metalaxyl |
| 166 | GOICDS_CDS0045 | Penthiopyrad |
| 166 | GOICDS_CDS0045 | 3-Difluoromethyl-1- |
| | | methyl-1H-pyrazole- |
| | | 4-carboxylic |
| | | acid(2′,4′,5′-trifluoro- |
| | | biphenyl-2-yl)-amide |
| 166 | GOICDS_CDS0045 | Dimethomorph |
| 166 | GOICDS_CDS0045 | Difenoconazole |
| 166 | GOICDS_CDS0045 | Epoxiconazole |
| 166 | GOICDS_CDS0045 | Fluquinconazole |
| 166 | GOICDS_CDS0045 | Metconazol |
| 166 | GOICDS_CDS0045 | Propiconazole |
| 166 | GOICDS_CDS0045 | Prothioconazole |
| 166 | GOICDS_CDS0045 | Tebuconazole |
| 166 | GOICDS_CDS0045 | Triticonazole |
| 166 | GOICDS_CDS0045 | Prochloraz |
| 166 | GOICDS_CDS0045 | Carbendazim |
| 166 | GOICDS_CDS0045 | Cyprodinil |
| 166 | GOICDS_CDS0045 | Pyrimethanil |
| 166 | GOICDS_CDS0045 | Fenpropimorph |
| 166 | GOICDS_CDS0045 | Tridemorph |
| 166 | GOICDS_CDS0045 | Iprodione |
| 166 | GOICDS_CDS0045 | 5-ethyl-6-octyl-[1,2,4]triazolo[1, |
| | | 5-a]pyrimidine- |
| | | 7-ylamine |
| 166 | GOICDS_CDS0045 | Mancozeb |
| 166 | GOICDS_CDS0045 | Maneb |
| 166 | GOICDS_CDS0045 | Metiram |
| 166 | GOICDS_CDS0045 | Dithianon |
| 166 | GOICDS_CDS0045 | Chlorothalonil |
| 166 | GOICDS_CDS0045 | ThiophanateMethyl |
| 166 | GOICDS_CDS0045 | Cymoxanil |
| 166 | GOICDS_CDS0045 | Metrafenone |
| 166 | GOICDS_CDS0045 | Acetochlor |
| 166 | GOICDS_CDS0045 | Dimethenamid |
| 166 | GOICDS_CDS0045 | Metolachlor |
| 166 | GOICDS_CDS0045 | Metazachlor |
| 166 | GOICDS_CDS0045 | Glyphosate |
| 166 | GOICDS_CDS0045 | Glufosinate |
| 166 | GOICDS_CDS0045 | Sulfosate |
| 166 | GOICDS_CDS0045 | Fenoxaprop |
| 166 | GOICDS_CDS0045 | Paraquat |
| 166 | GOICDS_CDS0045 | Cycloxydim |
| 166 | GOICDS_CDS0045 | Profoxydim |
| 166 | GOICDS_CDS0045 | Sethoxydim |
| 166 | GOICDS_CDS0045 | Tepraloxydim |
| 166 | GOICDS_CDS0045 | Pendimethalin |
| 166 | GOICDS_CDS0045 | Acifluorfen |
| 166 | GOICDS_CDS0045 | Imazamethabenz |
| 166 | GOICDS_CDS0045 | Imazamox |
| 166 | GOICDS_CDS0045 | Imazapic |
| 166 | GOICDS_CDS0045 | Imazapyr |
| 166 | GOICDS_CDS0045 | Imazaquin |
| 166 | GOICDS_CDS0045 | Imazethapyr |
| 166 | GOICDS_CDS0045 | 2,4-D |
| 166 | GOICDS_CDS0045 | Chloridazon |
| 166 | GOICDS_CDS0045 | Picloram |
| 166 | GOICDS_CDS0045 | Picolinafen |
| 166 | GOICDS_CDS0045 | Cyclosulfamuron |
| 166 | GOICDS_CDS0045 | Triflusulfuron |
| 166 | GOICDS_CDS0045 | Atrazine |
| 166 | GOICDS_CDS0045 | Pyroxasulfone |
| 166 | GOICDS_CDS0045 | Bentazone |
| 166 | GOICDS_CDS0045 | Cinidon-ethly |
| 166 | GOICDS_CDS0045 | Cinmethylin |
| 166 | GOICDS_CDS0045 | Dicamba |
| 166 | GOICDS_CDS0045 | Diflufenzopyr |
| 166 | GOICDS_CDS0045 | Quinclorac |
| 166 | GOICDS_CDS0045 | Quinmerac |
| 166 | GOICDS_CDS0045 | Mesotrione |
| 166 | GOICDS_CDS0045 | Saflufenacil |
| 166 | GOICDS_CDS0045 | Topramezone; |
| 167 | GOICDS_CDS0185 | acephate |
| 167 | GOICDS_CDS0185 | chlorpyrifos |
| 167 | GOICDS_CDS0185 | dimethoate |
| 167 | GOICDS_CDS0185 | methamidophos |
| 167 | GOICDS_CDS0185 | terbufos |
| 167 | GOICDS_CDS0185 | aldicarb |
| 167 | GOICDS_CDS0185 | carbofuran |
| 167 | GOICDS_CDS0185 | bifenthrin |
| 167 | GOICDS_CDS0185 | cypermethrin |
| 167 | GOICDS_CDS0185 | alpha-cypermethrin |
| 167 | GOICDS_CDS0185 | deltamethrin |
| 167 | GOICDS_CDS0185 | lambda-cyhalothrin |
| 167 | GOICDS_CDS0185 | tefluthrin |
| 167 | GOICDS_CDS0185 | flufenoxuron |
| 167 | GOICDS_CDS0185 | teflubenzuron |
| 167 | GOICDS_CDS0185 | spirotetramat; |
| 167 | GOICDS_CDS0185 | clothianidin |
| 167 | GOICDS_CDS0185 | imidacloprid |
| 167 | GOICDS_CDS0185 | thiamethoxam |
| 167 | GOICDS_CDS0185 | endosulfan |
| 167 | GOICDS_CDS0185 | fipronil |
| 167 | GOICDS_CDS0185 | abamectin |
| 167 | GOICDS_CDS0185 | spinosad |
| 167 | GOICDS_CDS0185 | spinetoram |
| 167 | GOICDS_CDS0185 | hydramethylnon; |
| 167 | GOICDS_CDS0185 | chlorfenapyr; |
| 167 | GOICDS_CDS0185 | indoxacarb |
| 167 | GOICDS_CDS0185 | metaflumizone |
| 167 | GOICDS_CDS0185 | flubendiamide |
| 167 | GOICDS_CDS0185 | chlorantraniliprole |
| 167 | GOICDS_CDS0185 | cyazypyr(HGW86) |
| 167 | GOICDS_CDS0185 | Azoxystrobin |
| 167 | GOICDS_CDS0185 | Dimoxystrobin |
| 167 | GOICDS_CDS0185 | Kresoxim-methyl |
| 167 | GOICDS_CDS0185 | Orysastrobin |
| 167 | GOICDS_CDS0185 | Pyraclostrobin |
| 167 | GOICDS_CDS0185 | Trifloxystrobin |
| 167 | GOICDS_CDS0185 | Bixafen |
| 167 | GOICDS_CDS0185 | Boscalid |
| 167 | GOICDS_CDS0185 | Isopyrazam |
| 167 | GOICDS_CDS0185 | Metalaxyl |
| 167 | GOICDS_CDS0185 | Penthiopyrad |
| 167 | GOICDS_CDS0185 | 3-Difluoromethyl-1- |
| | | methyl-1H-pyrazole- |
| | | 4-carboxylic |
| | | acid(2′,4′,5′-trifluoro- |
| | | biphenyl-2-yl)-amide |
| 167 | GOICDS_CDS0185 | Dimethomorph |
| 167 | GOICDS_CDS0185 | Difenoconazole |
| 167 | GOICDS_CDS0185 | Epoxiconazole |
| 167 | GOICDS_CDS0185 | Fluquinconazole |
| 167 | GOICDS_CDS0185 | Metconazol |
| 167 | GOICDS_CDS0185 | Propiconazole |
| 167 | GOICDS_CDS0185 | Prothioconazole |
| 167 | GOICDS_CDS0185 | Tebuconazole |
| 167 | GOICDS_CDS0185 | Triticonazole |
| 167 | GOICDS_CDS0185 | Prochloraz |
| 167 | GOICDS_CDS0185 | Carbendazim |
| 167 | GOICDS_CDS0185 | Cyprodinil |
| 167 | GOICDS_CDS0185 | Pyrimethanil |
| 167 | GOICDS_CDS0185 | Fenpropimorph |
| 167 | GOICDS_CDS0185 | Tridemorph |
| 167 | GOICDS_CDS0185 | Iprodione |
| 167 | GOICDS_CDS0185 | 5-ethyl-6-octyl-[1,2,4]triazolo[1, |
| | | 5-a]pyrimidine- |
| | | 7-ylamine |
| 167 | GOICDS_CDS0185 | Mancozeb |
| 167 | GOICDS_CDS0185 | Maneb |
| 167 | GOICDS_CDS0185 | Metiram |
| 167 | GOICDS_CDS0185 | Dithianon |
| 167 | GOICDS_CDS0185 | Chlorothalonil |
| 167 | GOICDS_CDS0185 | ThiophanateMethyl |
| 167 | GOICDS_CDS0185 | Cymoxanil |
| 167 | GOICDS_CDS0185 | Metrafenone |
| 167 | GOICDS_CDS0185 | Acetochlor |
| 167 | GOICDS_CDS0185 | Dimethenamid |
| 167 | GOICDS_CDS0185 | Metolachlor |
| 167 | GOICDS_CDS0185 | Metazachlor |
| 167 | GOICDS_CDS0185 | Glyphosate |
| 167 | GOICDS_CDS0185 | Glufosinate |
| 167 | GOICDS_CDS0185 | Sulfosate |
| 167 | GOICDS_CDS0185 | Fenoxaprop |
| 167 | GOICDS_CDS0185 | Paraquat |
| 167 | GOICDS_CDS0185 | Cycloxydim |
| 167 | GOICDS_CDS0185 | Profoxydim |
| 167 | GOICDS_CDS0185 | Sethoxydim |
| 167 | GOICDS_CDS0185 | Tepraloxydim |
| 167 | GOICDS_CDS0185 | Pendimethalin |
| 167 | GOICDS_CDS0185 | Acifluorfen |
| 167 | GOICDS_CDS0185 | Imazamethabenz |
| 167 | GOICDS_CDS0185 | Imazamox |
| 167 | GOICDS_CDS0185 | Imazapic |
| 167 | GOICDS_CDS0185 | Imazapyr |
| 167 | GOICDS_CDS0185 | Imazaquin |
| 167 | GOICDS_CDS0185 | Imazethapyr |
| 167 | GOICDS_CDS0185 | 2,4-D |
| 167 | GOICDS_CDS0185 | Chloridazon |
| 167 | GOICDS_CDS0185 | Picloram |
| 167 | GOICDS_CDS0185 | Picolinafen |
| 167 | GOICDS_CDS0185 | Cyclosulfamuron |
| 167 | GOICDS_CDS0185 | Triflusulfuron |
| 167 | GOICDS_CDS0185 | Atrazine |
| 167 | GOICDS_CDS0185 | Pyroxasulfone |
| 167 | GOICDS_CDS0185 | Bentazone |
| 167 | GOICDS_CDS0185 | Cinidon-ethly |
| 167 | GOICDS_CDS0185 | Cinmethylin |
| 167 | GOICDS_CDS0185 | Dicamba |
| 167 | GOICDS_CDS0185 | Diflufenzopyr |
| 167 | GOICDS_CDS0185 | Quinclorac |
| 167 | GOICDS_CDS0185 | Quinmerac |
| 167 | GOICDS_CDS0185 | Mesotrione |
| 167 | GOICDS_CDS0185 | Saflufenacil |
| 167 | GOICDS_CDS0185 | Topramezone; |
| 168 | | acephate |
| 168 | | chlorpyrifos |
| 168 | | dimethoate |
| 168 | | methamidophos |
| 168 | | terbufos |
| 168 | | aldicarb |
| 168 | | carbofuran |
| 168 | | bifenthrin |
| 168 | | cypermethrin |
| 168 | | alpha-cypermethrin |
| 168 | | deltamethrin |
| 168 | | lambda-cyhalothrin |
| 168 | | tefluthrin |
| 168 | | flufenoxuron |
| 168 | | teflubenzuron |
| 168 | | spirotetramat; |
| 168 | | clothianidin |
| 168 | | imidacloprid |
| 168 | | thiamethoxam |
| 168 | | endosulfan |
| 168 | | fipronil |
| 168 | | abamectin |
| 168 | | spinosad |
| 168 | | spinetoram |
| 168 | | hydramethylnon; |
| 168 | | chlorfenapyr; |
| 168 | | indoxacarb |
| 168 | | metaflumizone |
| 168 | | flubendiamide |
| 168 | | chlorantraniliprole |
| 168 | | cyazypyr(HGW86) |
| 168 | | Azoxystrobin |
| 168 | | Dimoxystrobin |
| 168 | | Kresoxim-methyl |
| 168 | | Orysastrobin |
| 168 | | Pyraclostrobin |
| 168 | | Trifloxystrobin |
| 168 | | Bixafen |
| 168 | | Boscalid |
| 168 | | Isopyrazam |
| 168 | | Metalaxyl |
| 168 | | Penthiopyrad |
| 168 | | 3-Difluoromethyl-1- |
| | | methyl-1H-pyrazole- |
| | | 4-carboxylic |
| | | acid(2′,4′,5′-trifluoro- |
| | | biphenyl-2-yl)-amide |
| 168 | | Dimethomorph |
| 168 | | Difenoconazole |
| 168 | | Epoxiconazole |
| 168 | | Fluquinconazole |
| 168 | | Metconazol |
| 168 | | Propiconazole |
| 168 | | Prothioconazole |
| 168 | | Tebuconazole |
| 168 | | Triticonazole |
| 168 | | Prochloraz |
| 168 | | Carbendazim |
| 168 | | Cyprodinil |
| 168 | | Pyrimethanil |
| 168 | | Fenpropimorph |
| 168 | | Tridemorph |
| 168 | | Iprodione |
| 168 | | 5-ethyl-6-octyl-[1,2,4]triazolo[1, |
| | | 5-a]pyrimidine- |
| | | 7-ylamine |
| 168 | | Mancozeb |
| 168 | | Maneb |
| 168 | | Metiram |
| 168 | | Dithianon |
| 168 | | Chlorothalonil |
| 168 | | ThiophanateMethyl |
| 168 | | Cymoxanil |
| 168 | | Metrafenone |
| 168 | | Acetochlor |
| 168 | | Dimethenamid |
| 168 | | Metolachlor |
| 168 | | Metazachlor |
| 168 | | Glyphosate |
| 168 | | Glufosinate |
| 168 | | Sulfosate |
| 168 | | Fenoxaprop |
| 168 | | Paraquat |
| 168 | | Cycloxydim |
| 168 | | Profoxydim |
| 168 | | Sethoxydim |
| 168 | | Tepraloxydim |
| 168 | | Pendimethalin |
| 168 | | Acifluorfen |
| 168 | | Imazamethabenz |
| 168 | | Imazamox |
| 168 | | Imazapic |
| 168 | | Imazapyr |
| 168 | | Imazaquin |
| 168 | | Imazethapyr |
| 168 | | 2,4-D |
| 168 | | Chloridazon |
| 168 | | Picloram |
| 168 | | Picolinafen |
| 168 | | Cyclosulfamuron |
| 168 | | Triflusulfuron |
| 168 | | Atrazine |
| 168 | | Pyroxasulfone |
| 168 | | Bentazone |
| 168 | | Cinidon-ethly |
| 168 | | Cinmethylin |
| 168 | | Dicamba |
| 168 | | Diflufenzopyr |
| 168 | | Quinclorac |
| 168 | | Quinmerac |
| 168 | | Mesotrione |
| 168 | | Saflufenacil |
| 168 | | Topramezone; |
| 169 | | acephate |
| 169 | | chlorpyrifos |
| 169 | | dimethoate |
| 169 | | methamidophos |
| 169 | | terbufos |
| 169 | | aldicarb |
| 169 | | carbofuran |
| 169 | | bifenthrin |
| 169 | | cypermethrin |
| 169 | | alpha-cypermethrin |
| 169 | | deltamethrin |
| 169 | | lambda-cyhalothrin |
| 169 | | tefluthrin |
| 169 | | flufenoxuron |
| 169 | | teflubenzuron |
| 169 | | spirotetramat; |
| 169 | | clothianidin |
| 169 | | imidacloprid |
| 169 | | thiamethoxam |
| 169 | | endosulfan |
| 169 | | fipronil |
| 169 | | abamectin |
| 169 | | spinosad |
| 169 | | spinetoram |
| 169 | | hydramethylnon; |
| 169 | | chlorfenapyr; |
| 169 | | indoxacarb |
| 169 | | metaflumizone |
| 169 | | flubendiamide |
| 169 | | chlorantraniliprole |
| 169 | | cyazypyr(HGW86) |
| 169 | | Azoxystrobin |
| 169 | | Dimoxystrobin |
| 169 | | Kresoxim-methyl |
| 169 | | Orysastrobin |
| 169 | | Pyraclostrobin |
| 169 | | Trifloxystrobin |
| 169 | | Bixafen |
| 169 | | Boscalid |
| 169 | | Isopyrazam |
| 169 | | Metalaxyl |
| 169 | | Penthiopyrad |
| 169 | | 3-Difluoromethyl-1- |
| | | methyl-1H-pyrazole- |
| | | 4-carboxylic |
| | | acid(2′,4′,5′-trifluoro- |
| | | biphenyl-2-yl)-amide |
| 169 | | Dimethomorph |
| 169 | | Difenoconazole |
| 169 | | Epoxiconazole |
| 169 | | Fluquinconazole |
| 169 | | Metconazol |
| 169 | | Propiconazole |
| 169 | | Prothioconazole |
| 169 | | Tebuconazole |
| 169 | | Triticonazole |
| 169 | | Prochloraz |
| 169 | | Carbendazim |
| 169 | | Cyprodinil |
| 169 | | Pyrimethanil |
| 169 | | Fenpropimorph |
| 169 | | Tridemorph |
| 169 | | Iprodione |
| 169 | | 5-ethyl-6-octyl-[1,2,4]triazolo[1, |
| | | 5-a]pyrimidine- |
| | | 7-ylamine |
| 169 | | Mancozeb |
| 169 | | Maneb |
| 169 | | Metiram |
| 169 | | Dithianon |
| 169 | | Chlorothalonil |
| 169 | | ThiophanateMethyl |
| 169 | | Cymoxanil |
| 169 | | Metrafenone |
| 169 | | Acetochlor |
| 169 | | Dimethenamid |
| 169 | | Metolachlor |
| 169 | | Metazachlor |
| 169 | | Glyphosate |
| 169 | | Glufosinate |
| 169 | | Sulfosate |
| 169 | | Fenoxaprop |
| 169 | | Paraquat |
| 169 | | Cycloxydim |
| 169 | | Profoxydim |
| 169 | | Sethoxydim |
| 169 | | Tepraloxydim |
| 169 | | Pendimethalin |
| 169 | | Acifluorfen |
| 169 | | Imazamethabenz |
| 169 | | Imazamox |
| 169 | | Imazapic |
| 169 | | Imazapyr |
| 169 | | Imazaquin |
| 169 | | Imazethapyr |
| 169 | | 2,4-D |
| 169 | | Chloridazon |
| 169 | | Picloram |
| 169 | | Picolinafen |
| 169 | | Cyclosulfamuron |
| 169 | | Triflusulfuron |
| 169 | | Atrazine |
| 169 | | Pyroxasulfone |
| 169 | | Bentazone |
| 169 | | Cinidon-ethly |
| 169 | | Cinmethylin |
| 169 | | Dicamba |
| 169 | | Diflufenzopyr |
| 169 | | Quinclorac |
| 169 | | Quinmerac |
| 169 | | Mesotrione |
| 169 | | Saflufenacil |
| 169 | | Topramezone; |
| 170 | GOICDS_CDS0647 | acephate |
| 170 | GOICDS_CDS0647 | chlorpyrifos |
| 170 | GOICDS_CDS0647 | dimethoate |
| 170 | GOICDS_CDS0647 | methamidophos |
| 170 | GOICDS_CDS0647 | terbufos |
| 170 | GOICDS_CDS0647 | aldicarb |
| 170 | GOICDS_CDS0647 | carbofuran |
| 170 | GOICDS_CDS0647 | bifenthrin |
| 170 | GOICDS_CDS0647 | cypermethrin |
| 170 | GOICDS_CDS0647 | alpha-cypermethrin |
| 170 | GOICDS_CDS0647 | deltamethrin |
| 170 | GOICDS_CDS0647 | lambda-cyhalothrin |
| 170 | GOICDS_CDS0647 | tefluthrin |
| 170 | GOICDS_CDS0647 | flufenoxuron |
| 170 | GOICDS_CDS0647 | teflubenzuron |
| 170 | GOICDS_CDS0647 | spirotetramat; |
| 170 | GOICDS_CDS0647 | clothianidin |
| 170 | GOICDS_CDS0647 | imidacloprid |
| 170 | GOICDS_CDS0647 | thiamethoxam |
| 170 | GOICDS_CDS0647 | endosulfan |
| 170 | GOICDS_CDS0647 | fipronil |
| 170 | GOICDS_CDS0647 | abamectin |
| 170 | GOICDS_CDS0647 | spinosad |
| 170 | GOICDS_CDS0647 | spinetoram |
| 170 | GOICDS_CDS0647 | hydramethylnon; |
| 170 | GOICDS_CDS0647 | chlorfenapyr; |
| 170 | GOICDS_CDS0647 | indoxacarb |
| 170 | GOICDS_CDS0647 | metaflumizone |
| 170 | GOICDS_CDS0647 | flubendiamide |
| 170 | GOICDS_CDS0647 | chlorantraniliprole |
| 170 | GOICDS_CDS0647 | cyazypyr(HGW86) |
| 170 | GOICDS_CDS0647 | Azoxystrobin |
| 170 | GOICDS_CDS0647 | Dimoxystrobin |
| 170 | GOICDS_CDS0647 | Kresoxim-methyl |
| 170 | GOICDS_CDS0647 | Orysastrobin |
| 170 | GOICDS_CDS0647 | Pyraclostrobin |
| 170 | GOICDS_CDS0647 | Trifloxystrobin |
| 170 | GOICDS_CDS0647 | Bixafen |
| 170 | GOICDS_CDS0647 | Boscalid |
| 170 | GOICDS_CDS0647 | Isopyrazam |
| 170 | GOICDS_CDS0647 | Metalaxyl |
| 170 | GOICDS_CDS0647 | Penthiopyrad |
| 170 | GOICDS_CDS0647 | 3-Difluoromethyl-1- |
| | | methyl-1H-pyrazole- |
| | | 4-carboxylic |
| | | acid(2′,4′,5′-trifluoro- |
| | | biphenyl-2-yl)-amide |
| 170 | GOICDS_CDS0647 | Dimethomorph |
| 170 | GOICDS_CDS0647 | Difenoconazole |
| 170 | GOICDS_CDS0647 | Epoxiconazole |
| 170 | GOICDS_CDS0647 | Fluquinconazole |
| 170 | GOICDS_CDS0647 | Metconazol |
| 170 | GOICDS_CDS0647 | Propiconazole |
| 170 | GOICDS_CDS0647 | Prothioconazole |
| 170 | GOICDS_CDS0647 | Tebuconazole |
| 170 | GOICDS_CDS0647 | Triticonazole |
| 170 | GOICDS_CDS0647 | Prochloraz |
| 170 | GOICDS_CDS0647 | Carbendazim |
| 170 | GOICDS_CDS0647 | Cyprodinil |
| 170 | GOICDS_CDS0647 | Pyrimethanil |
| 170 | GOICDS_CDS0647 | Fenpropimorph |
| 170 | GOICDS_CDS0647 | Tridemorph |
| 170 | GOICDS_CDS0647 | Iprodione |
| 170 | GOICDS_CDS0647 | 5-ethyl-6-octyl-[1,2,4]triazolo[1, |
| | | 5-a]pyrimidine- |
| | | 7-ylamine |
| 170 | GOICDS_CDS0647 | Mancozeb |
| 170 | GOICDS_CDS0647 | Maneb |
| 170 | GOICDS_CDS0647 | Metiram |
| 170 | GOICDS_CDS0647 | Dithianon |
| 170 | GOICDS_CDS0647 | Chlorothalonil |
| 170 | GOICDS_CDS0647 | ThiophanateMethyl |
| 170 | GOICDS_CDS0647 | Cymoxanil |
| 170 | GOICDS_CDS0647 | Metrafenone |
| 170 | GOICDS_CDS0647 | Acetochlor |
| 170 | GOICDS_CDS0647 | Dimethenamid |
| 170 | GOICDS_CDS0647 | Metolachlor |
| 170 | GOICDS_CDS0647 | Metazachlor |
| 170 | GOICDS_CDS0647 | Glyphosate |
| 170 | GOICDS_CDS0647 | Glufosinate |
| 170 | GOICDS_CDS0647 | Sulfosate |
| 170 | GOICDS_CDS0647 | Fenoxaprop |
| 170 | GOICDS_CDS0647 | Paraquat |
| 170 | GOICDS_CDS0647 | Cycloxydim |
| 170 | GOICDS_CDS0647 | Profoxydim |
| 170 | GOICDS_CDS0647 | Sethoxydim |
| 170 | GOICDS_CDS0647 | Tepraloxydim |
| 170 | GOICDS_CDS0647 | Pendimethalin |
| 170 | GOICDS_CDS0647 | Acifluorfen |
| 170 | GOICDS_CDS0647 | Imazamethabenz |
| 170 | GOICDS_CDS0647 | Imazamox |
| 170 | GOICDS_CDS0647 | Imazapic |
| 170 | GOICDS_CDS0647 | Imazapyr |
| 170 | GOICDS_CDS0647 | Imazaquin |
| 170 | GOICDS_CDS0647 | Imazethapyr |
| 170 | GOICDS_CDS0647 | 2,4-D |
| 170 | GOICDS_CDS0647 | Chloridazon |
| 170 | GOICDS_CDS0647 | Picloram |
| 170 | GOICDS_CDS0647 | Picolinafen |
| 170 | GOICDS_CDS0647 | Cyclosulfamuron |
| 170 | GOICDS_CDS0647 | Triflusulfuron |
| 170 | GOICDS_CDS0647 | Atrazine |
| 170 | GOICDS_CDS0647 | Pyroxasulfone |
| 170 | GOICDS_CDS0647 | Bentazone |
| 170 | GOICDS_CDS0647 | Cinidon-ethly |
| 170 | GOICDS_CDS0647 | Cinmethylin |
| 170 | GOICDS_CDS0647 | Dicamba |
| 170 | GOICDS_CDS0647 | Diflufenzopyr |
| 170 | GOICDS_CDS0647 | Quinclorac |
| 170 | GOICDS_CDS0647 | Quinmerac |
| 170 | GOICDS_CDS0647 | Mesotrione |
| 170 | GOICDS_CDS0647 | Saflufenacil |
| 170 | GOICDS_CDS0647 | Topramezone; |
| 171 | | acephate |
| 171 | | chlorpyrifos |
| 171 | | dimethoate |
| 171 | | methamidophos |
| 171 | | terbufos |
| 171 | | aldicarb |
| 171 | | carbofuran |
| 171 | | bifenthrin |
| 171 | | cypermethrin |
| 171 | | alpha-cypermethrin |
| 171 | | deltamethrin |
| 171 | | lambda-cyhalothrin |
| 171 | | tefluthrin |
| 171 | | flufenoxuron |
| 171 | | teflubenzuron |
| 171 | | spirotetramat; |
| 171 | | clothianidin |
| 171 | | imidacloprid |
| 171 | | thiamethoxam |
| 171 | | endosulfan |
| 171 | | fipronil |
| 171 | | abamectin |
| 171 | | spinosad |
| 171 | | spinetoram |
| 171 | | hydramethylnon; |
| 171 | | chlorfenapyr; |
| 171 | | indoxacarb |
| 171 | | metaflumizone |
| 171 | | flubendiamide |
| 171 | | chlorantraniliprole |
| 171 | | cyazypyr(HGW86) |
| 171 | | Azoxystrobin |
| 171 | | Dimoxystrobin |
| 171 | | Kresoxim-methyl |
| 171 | | Orysastrobin |
| 171 | | Pyraclostrobin |
| 171 | | Trifloxystrobin |
| 171 | | Bixafen |
| 171 | | Boscalid |
| 171 | | Isopyrazam |
| 171 | | Metalaxyl |
| 171 | | Penthiopyrad |
| 171 | | 3-Difluoromethyl-1- |
| | | methyl-1H-pyrazole- |
| | | 4-carboxylic |
| | | acid(2′,4′,5′-trifluoro- |
| | | biphenyl-2-yl)-amide |
| 171 | | Dimethomorph |
| 171 | | Difenoconazole |
| 171 | | Epoxiconazole |
| 171 | | Fluquinconazole |
| 171 | | Metconazol |
| 171 | | Propiconazole |
| 171 | | Prothioconazole |
| 171 | | Tebuconazole |
| 171 | | Triticonazole |
| 171 | | Prochloraz |
| 171 | | Carbendazim |
| 171 | | Cyprodinil |
| 171 | | Pyrimethanil |
| 171 | | Fenpropimorph |
| 171 | | Tridemorph |
| 171 | | Iprodione |
| 171 | | 5-ethyl-6-octyl-[1,2,4]triazolo[1, |
| | | 5-a]pyrimidine- |
| | | 7-ylamine |
| 171 | | Mancozeb |
| 171 | | Maneb |
| 171 | | Metiram |
| 171 | | Dithianon |
| 171 | | Chlorothalonil |
| 171 | | ThiophanateMethyl |
| 171 | | Cymoxanil |
| 171 | | Metrafenone |
| 171 | | Acetochlor |
| 171 | | Dimethenamid |
| 171 | | Metolachlor |
| 171 | | Metazachlor |
| 171 | | Glyphosate |
| 171 | | Glufosinate |
| 171 | | Sulfosate |
| 171 | | Fenoxaprop |
| 171 | | Paraquat |
| 171 | | Cycloxydim |
| 171 | | Profoxydim |
| 171 | | Sethoxydim |
| 171 | | Tepraloxydim |
| 171 | | Pendimethalin |
| 171 | | Acifluorfen |
| 171 | | Imazamethabenz |
| 171 | | Imazamox |
| 171 | | Imazapic |
| 171 | | Imazapyr |
| 171 | | Imazaquin |
| 171 | | Imazethapyr |
| 171 | | 2,4-D |
| 171 | | Chloridazon |
| 171 | | Picloram |
| 171 | | Picolinafen |
| 171 | | Cyclosulfamuron |
| 171 | | Triflusulfuron |
| 171 | | Atrazine |
| 171 | | Pyroxasulfone |
| 171 | | Bentazone |
| 171 | | Cinidon-ethly |
| 171 | | Cinmethylin |
| 171 | | Dicamba |
| 171 | | Diflufenzopyr |
| 171 | | Quinclorac |
| 171 | | Quinmerac |
| 171 | | Mesotrione |
| 171 | | Saflufenacil |
| 171 | | Topramezone; |
| 172 | GOICDS_CDS1499_2 | acephate |
| 172 | GOICDS_CDS1499_2 | chlorpyrifos |
| 172 | GOICDS_CDS1499_2 | dimethoate |
| 172 | GOICDS_CDS1499_2 | methamidophos |
| 172 | GOICDS_CDS1499_2 | terbufos |
| 172 | GOICDS_CDS1499_2 | aldicarb |
| 172 | GOICDS_CDS1499_2 | carbofuran |
| 172 | GOICDS_CDS1499_2 | bifenthrin |
| 172 | GOICDS_CDS1499_2 | cypermethrin |
| 172 | GOICDS_CDS1499_2 | alpha-cypermethrin |
| 172 | GOICDS_CDS1499_2 | deltamethrin |
| 172 | GOICDS_CDS1499_2 | lambda-cyhalothrin |
| 172 | GOICDS_CDS1499_2 | tefluthrin |
| 172 | GOICDS_CDS1499_2 | flufenoxuron |
| 172 | GOICDS_CDS1499_2 | teflubenzuron |
| 172 | GOICDS_CDS1499_2 | spirotetramat; |
| 172 | GOICDS_CDS1499_2 | clothianidin |
| 172 | GOICDS_CDS1499_2 | imidacloprid |
| 172 | GOICDS_CDS1499_2 | thiamethoxam |
| 172 | GOICDS_CDS1499_2 | endosulfan |
| 172 | GOICDS_CDS1499_2 | fipronil |
| 172 | GOICDS_CDS1499_2 | abamectin |
| 172 | GOICDS_CDS1499_2 | spinosad |
| 172 | GOICDS_CDS1499_2 | spinetoram |
| 172 | GOICDS_CDS1499_2 | hydramethylnon; |
| 172 | GOICDS_CDS1499_2 | chlorfenapyr; |
| 172 | GOICDS_CDS1499_2 | indoxacarb |
| 172 | GOICDS_CDS1499_2 | metaflumizone |
| 172 | GOICDS_CDS1499_2 | flubendiamide |
| 172 | GOICDS_CDS1499_2 | chlorantraniliprole |
| 172 | GOICDS_CDS1499_2 | cyazypyr(HGW86) |
| 172 | GOICDS_CDS1499_2 | Azoxystrobin |
| 172 | GOICDS_CDS1499_2 | Dimoxystrobin |
| 172 | GOICDS_CDS1499_2 | Kresoxim-methyl |
| 172 | GOICDS_CDS1499_2 | Orysastrobin |
| 172 | GOICDS_CDS1499_2 | Pyraclostrobin |
| 172 | GOICDS_CDS1499_2 | Trifloxystrobin |
| 172 | GOICDS_CDS1499_2 | Bixafen |
| 172 | GOICDS_CDS1499_2 | Boscalid |
| 172 | GOICDS_CDS1499_2 | Isopyrazam |
| 172 | GOICDS_CDS1499_2 | Metalaxyl |
| 172 | GOICDS_CDS1499_2 | Penthiopyrad |
| 172 | GOICDS_CDS1499_2 | 3-Difluoromethyl-1- |
| | | methyl-1H-pyrazole- |
| | | 4-carboxylic |
| | | acid(2′,4′,5′-trifluoro- |
| | | biphenyl-2-yl)-amide |
| 172 | GOICDS_CDS1499_2 | Dimethomorph |
| 172 | GOICDS_CDS1499_2 | Difenoconazole |
| 172 | GOICDS_CDS1499_2 | Epoxiconazole |
| 172 | GOICDS_CDS1499_2 | Fluquinconazole |
| 172 | GOICDS_CDS1499_2 | Metconazol |
| 172 | GOICDS_CDS1499_2 | Propiconazole |
| 172 | GOICDS_CDS1499_2 | Prothioconazole |
| 172 | GOICDS_CDS1499_2 | Tebuconazole |
| 172 | GOICDS_CDS1499_2 | Triticonazole |
| 172 | GOICDS_CDS1499_2 | Prochloraz |
| 172 | GOICDS_CDS1499_2 | Carbendazim |
| 172 | GOICDS_CDS1499_2 | Cyprodinil |
| 172 | GOICDS_CDS1499_2 | Pyrimethanil |
| 172 | GOICDS_CDS1499_2 | Fenpropimorph |
| 172 | GOICDS_CDS1499_2 | Tridemorph |
| 172 | GOICDS_CDS1499_2 | Iprodione |
| 172 | GOICDS_CDS1499_2 | 5-ethyl-6-octyl-[1,2,4]triazolo[1, |
| | | 5-a]pyrimidine- |
| | | 7-ylamine |
| 172 | GOICDS_CDS1499_2 | Mancozeb |
| 172 | GOICDS_CDS1499_2 | Maneb |
| 172 | GOICDS_CDS1499_2 | Metiram |
| 172 | GOICDS_CDS1499_2 | Dithianon |
| 172 | GOICDS_CDS1499_2 | Chlorothalonil |
| 172 | GOICDS_CDS1499_2 | ThiophanateMethyl |
| 172 | GOICDS_CDS1499_2 | Cymoxanil |
| 172 | GOICDS_CDS1499_2 | Metrafenone |
| 172 | GOICDS_CDS1499_2 | Acetochlor |
| 172 | GOICDS_CDS1499_2 | Dimethenamid |
| 172 | GOICDS_CDS1499_2 | Metolachlor |
| 172 | GOICDS_CDS1499_2 | Metazachlor |
| 172 | GOICDS_CDS1499_2 | Glyphosate |
| 172 | GOICDS_CDS1499_2 | Glufosinate |
| 172 | GOICDS_CDS1499_2 | Sulfosate |
| 172 | GOICDS_CDS1499_2 | Fenoxaprop |
| 172 | GOICDS_CDS1499_2 | Paraquat |
| 172 | GOICDS_CDS1499_2 | Cycloxydim |
| 172 | GOICDS_CDS1499_2 | Profoxydim |
| 172 | GOICDS_CDS1499_2 | Sethoxydim |
| 172 | GOICDS_CDS1499_2 | Tepraloxydim |
| 172 | GOICDS_CDS1499_2 | Pendimethalin |
| 172 | GOICDS_CDS1499_2 | Acifluorfen |
| 172 | GOICDS_CDS1499_2 | Imazamethabenz |
| 172 | GOICDS_CDS1499_2 | Imazamox |
| 172 | GOICDS_CDS1499_2 | Imazapic |
| 172 | GOICDS_CDS1499_2 | Imazapyr |
| 172 | GOICDS_CDS1499_2 | Imazaquin |
| 172 | GOICDS_CDS1499_2 | Imazethapyr |
| 172 | GOICDS_CDS1499_2 | 2,4-D |
| 172 | GOICDS_CDS1499_2 | Chloridazon |
| 172 | GOICDS_CDS1499_2 | Picloram |
| 172 | GOICDS_CDS1499_2 | Picolinafen |
| 172 | GOICDS_CDS1499_2 | Cyclosulfamuron |
| 172 | GOICDS_CDS1499_2 | Triflusulfuron |
| 172 | GOICDS_CDS1499_2 | Atrazine |
| 172 | GOICDS_CDS1499_2 | Pyroxasulfone |
| 172 | GOICDS_CDS1499_2 | Bentazone |
| 172 | GOICDS_CDS1499_2 | Cinidon-ethly |
| 172 | GOICDS_CDS1499_2 | Cinmethylin |
| 172 | GOICDS_CDS1499_2 | Dicamba |
| 172 | GOICDS_CDS1499_2 | Diflufenzopyr |
| 172 | GOICDS_CDS1499_2 | Quinclorac |
| 172 | GOICDS_CDS1499_2 | Quinmerac |
| 172 | GOICDS_CDS1499_2 | Mesotrione |
| 172 | GOICDS_CDS1499_2 | Saflufenacil |
| 172 | GOICDS_CDS1499_2 | Topramezone; |
| 173 | GOICDS_CDS1532 | acephate |
| 173 | GOICDS_CDS1532 | chlorpyrifos |
| 173 | GOICDS_CDS1532 | dimethoate |
| 173 | GOICDS_CDS1532 | methamidophos |
| 173 | GOICDS_CDS1532 | terbufos |
| 173 | GOICDS_CDS1532 | aldicarb |
| 173 | GOICDS_CDS1532 | carbofuran |
| 173 | GOICDS_CDS1532 | bifenthrin |
| 173 | GOICDS_CDS1532 | cypermethrin |
| 173 | GOICDS_CDS1532 | alpha-cypermethrin |
| 173 | GOICDS_CDS1532 | deltamethrin |
| 173 | GOICDS_CDS1532 | lambda-cyhalothrin |
| 173 | GOICDS_CDS1532 | tefluthrin |
| 173 | GOICDS_CDS1532 | flufenoxuron |
| 173 | GOICDS_CDS1532 | teflubenzuron |
| 173 | GOICDS_CDS1532 | spirotetramat; |
| 173 | GOICDS_CDS1532 | clothianidin |
| 173 | GOICDS_CDS1532 | imidacloprid |
| 173 | GOICDS_CDS1532 | thiamethoxam |
| 173 | GOICDS_CDS1532 | endosulfan |
| 173 | GOICDS_CDS1532 | fipronil |
| 173 | GOICDS_CDS1532 | abamectin |
| 173 | GOICDS_CDS1532 | spinosad |
| 173 | GOICDS_CDS1532 | spinetoram |
| 173 | GOICDS_CDS1532 | hydramethylnon; |
| 173 | GOICDS_CDS1532 | chlorfenapyr; |
| 173 | GOICDS_CDS1532 | indoxacarb |
| 173 | GOICDS_CDS1532 | metaflumizone |
| 173 | GOICDS_CDS1532 | flubendiamide |
| 173 | GOICDS_CDS1532 | chlorantraniliprole |
| 173 | GOICDS_CDS1532 | cyazypyr(HGW86) |
| 173 | GOICDS_CDS1532 | Azoxystrobin |
| 173 | GOICDS_CDS1532 | Dimoxystrobin |
| 173 | GOICDS_CDS1532 | Kresoxim-methyl |
| 173 | GOICDS_CDS1532 | Orysastrobin |
| 173 | GOICDS_CDS1532 | Pyraclostrobin |
| 173 | GOICDS_CDS1532 | Trifloxystrobin |
| 173 | GOICDS_CDS1532 | Bixafen |
| 173 | GOICDS_CDS1532 | Boscalid |
| 173 | GOICDS_CDS1532 | Isopyrazam |
| 173 | GOICDS_CDS1532 | Metalaxyl |
| 173 | GOICDS_CDS1532 | Penthiopyrad |
| 173 | GOICDS_CDS1532 | 3-Difluoromethyl-1- |
| | | methyl-1H-pyrazole- |
| | | 4-carboxylic |
| | | acid(2′,4′,5′-trifluoro- |
| | | biphenyl-2-yl)-amide |
| 173 | GOICDS_CDS1532 | Dimethomorph |
| 173 | GOICDS_CDS1532 | Difenoconazole |
| 173 | GOICDS_CDS1532 | Epoxiconazole |
| 173 | GOICDS_CDS1532 | Fluquinconazole |
| 173 | GOICDS_CDS1532 | Metconazol |
| 173 | GOICDS_CDS1532 | Propiconazole |
| 173 | GOICDS_CDS1532 | Prothioconazole |
| 173 | GOICDS_CDS1532 | Tebuconazole |
| 173 | GOICDS_CDS1532 | Triticonazole |
| 173 | GOICDS_CDS1532 | Prochloraz |
| 173 | GOICDS_CDS1532 | Carbendazim |
| 173 | GOICDS_CDS1532 | Cyprodinil |
| 173 | GOICDS_CDS1532 | Pyrimethanil |
| 173 | GOICDS_CDS1532 | Fenpropimorph |
| 173 | GOICDS_CDS1532 | Tridemorph |
| 173 | GOICDS_CDS1532 | Iprodione |
| 173 | GOICDS_CDS1532 | 5-ethyl-6-octyl-[1,2,4]triazolo[1, |
| | | 5-a]pyrimidine- |
| | | 7-ylamine |
| 173 | GOICDS_CDS1532 | Mancozeb |
| 173 | GOICDS_CDS1532 | Maneb |
| 173 | GOICDS_CDS1532 | Metiram |
| 173 | GOICDS_CDS1532 | Dithianon |
| 173 | GOICDS_CDS1532 | Chlorothalonil |
| 173 | GOICDS_CDS1532 | ThiophanateMethyl |
| 173 | GOICDS_CDS1532 | Cymoxanil |
| 173 | GOICDS_CDS1532 | Metrafenone |
| 173 | GOICDS_CDS1532 | Acetochlor |
| 173 | GOICDS_CDS1532 | Dimethenamid |
| 173 | GOICDS_CDS1532 | Metolachlor |
| 173 | GOICDS_CDS1532 | Metazachlor |
| 173 | GOICDS_CDS1532 | Glyphosate |
| 173 | GOICDS_CDS1532 | Glufosinate |
| 173 | GOICDS_CDS1532 | Sulfosate |
| 173 | GOICDS_CDS1532 | Fenoxaprop |
| 173 | GOICDS_CDS1532 | Paraquat |
| 173 | GOICDS_CDS1532 | Cycloxydim |
| 173 | GOICDS_CDS1532 | Profoxydim |
| 173 | GOICDS_CDS1532 | Sethoxydim |
| 173 | GOICDS_CDS1532 | Tepraloxydim |
| 173 | GOICDS_CDS1532 | Pendimethalin |
| 173 | GOICDS_CDS1532 | Acifluorfen |
| 173 | GOICDS_CDS1532 | Imazamethabenz |
| 173 | GOICDS_CDS1532 | Imazamox |
| 173 | GOICDS_CDS1532 | Imazapic |
| 173 | GOICDS_CDS1532 | Imazapyr |
| 173 | GOICDS_CDS1532 | Imazaquin |
| 173 | GOICDS_CDS1532 | Imazethapyr |
| 173 | GOICDS_CDS1532 | 2,4-D |
| 173 | GOICDS_CDS1532 | Chloridazon |
| 173 | GOICDS_CDS1532 | Picloram |
| 173 | GOICDS_CDS1532 | Picolinafen |
| 173 | GOICDS_CDS1532 | Cyclosulfamuron |
| 173 | GOICDS_CDS1532 | Triflusulfuron |
| 173 | GOICDS_CDS1532 | Atrazine |
| 173 | GOICDS_CDS1532 | Pyroxasulfone |
| 173 | GOICDS_CDS1532 | Bentazone |
| 173 | GOICDS_CDS1532 | Cinidon-ethly |
| 173 | GOICDS_CDS1532 | Cinmethylin |
| 173 | GOICDS_CDS1532 | Dicamba |
| 173 | GOICDS_CDS1532 | Diflufenzopyr |
| 173 | GOICDS_CDS1532 | Quinclorac |
| 173 | GOICDS_CDS1532 | Quinmerac |
| 173 | GOICDS_CDS1532 | Mesotrione |
| 173 | GOICDS_CDS1532 | Saflufenacil |
| 173 | GOICDS_CDS1532 | Topramezone; |
| 174 | _GOICDS_CDS3325 | acephate |
| 174 | _GOICDS_CDS3325 | chlorpyrifos |
| 174 | _GOICDS_CDS3325 | dimethoate |
| 174 | _GOICDS_CDS3325 | methamidophos |
| 174 | _GOICDS_CDS3325 | terbufos |
| 174 | _GOICDS_CDS3325 | aldicarb |
| 174 | _GOICDS_CDS3325 | carbofuran |
| 174 | _GOICDS_CDS3325 | bifenthrin |
| 174 | _GOICDS_CDS3325 | cypermethrin |
| 174 | _GOICDS_CDS3325 | alpha-cypermethrin |
| 174 | _GOICDS_CDS3325 | deltamethrin |
| 174 | _GOICDS_CDS3325 | lambda-cyhalothrin |
| 174 | _GOICDS_CDS3325 | tefluthrin |
| 174 | _GOICDS_CDS3325 | flufenoxuron |
| 174 | _GOICDS_CDS3325 | teflubenzuron |
| 174 | _GOICDS_CDS3325 | spirotetramat; |
| 174 | _GOICDS_CDS3325 | clothianidin |
| 174 | _GOICDS_CDS3325 | imidacloprid |
| 174 | _GOICDS_CDS3325 | thiamethoxam |
| 174 | _GOICDS_CDS3325 | endosulfan |
| 174 | _GOICDS_CDS3325 | fipronil |
| 174 | _GOICDS_CDS3325 | abamectin |
| 174 | _GOICDS_CDS3325 | spinosad |
| 174 | _GOICDS_CDS3325 | spinetoram |
| 174 | _GOICDS_CDS3325 | hydramethylnon; |
| 174 | _GOICDS_CDS3325 | chlorfenapyr; |
| 174 | _GOICDS_CDS3325 | indoxacarb |
| 174 | _GOICDS_CDS3325 | metaflumizone |
| 174 | _GOICDS_CDS3325 | flubendiamide |
| 174 | _GOICDS_CDS3325 | chlorantraniliprole |
| 174 | _GOICDS_CDS3325 | cyazypyr(HGW86) |
| 174 | _GOICDS_CDS3325 | Azoxystrobin |
| 174 | _GOICDS_CDS3325 | Dimoxystrobin |
| 174 | _GOICDS_CDS3325 | Kresoxim-methyl |
| 174 | _GOICDS_CDS3325 | Orysastrobin |
| 174 | _GOICDS_CDS3325 | Pyraclostrobin |
| 174 | _GOICDS_CDS3325 | Trifloxystrobin |
| 174 | _GOICDS_CDS3325 | Bixafen |
| 174 | _GOICDS_CDS3325 | Boscalid |
| 174 | _GOICDS_CDS3325 | Isopyrazam |
| 174 | _GOICDS_CDS3325 | Metalaxyl |
| 174 | _GOICDS_CDS3325 | Penthiopyrad |
| 174 | _GOICDS_CDS3325 | 3-Difluoromethyl-1- |
| | | methyl-1H-pyrazole- |
| | | 4-carboxylic |
| | | acid(2′,4′,5′-trifluoro- |
| | | biphenyl-2-yl)-amide |
| 174 | _GOICDS_CDS3325 | Dimethomorph |
| 174 | _GOICDS_CDS3325 | Difenoconazole |
| 174 | _GOICDS_CDS3325 | Epoxiconazole |
| 174 | _GOICDS_CDS3325 | Fluquinconazole |
| 174 | _GOICDS_CDS3325 | Metconazol |
| 174 | _GOICDS_CDS3325 | Propiconazole |
| 174 | _GOICDS_CDS3325 | Prothioconazole |
| 174 | _GOICDS_CDS3325 | Tebuconazole |
| 174 | _GOICDS_CDS3325 | Triticonazole |
| 174 | _GOICDS_CDS3325 | Prochloraz |
| 174 | _GOICDS_CDS3325 | Carbendazim |
| 174 | _GOICDS_CDS3325 | Cyprodinil |
| 174 | _GOICDS_CDS3325 | Pyrimethanil |
| 174 | _GOICDS_CDS3325 | Fenpropimorph |
| 174 | _GOICDS_CDS3325 | Tridemorph |
| 174 | _GOICDS_CDS3325 | Iprodione |
| 174 | _GOICDS_CDS3325 | 5-ethyl-6-octyl-[1,2,4]triazolo[1, |
| | | 5-a]pyrimidine- |
| | | 7-ylamine |
| 174 | _GOICDS_CDS3325 | Mancozeb |
| 174 | _GOICDS_CDS3325 | Maneb |
| 174 | _GOICDS_CDS3325 | Metiram |
| 174 | _GOICDS_CDS3325 | Dithianon |
| 174 | _GOICDS_CDS3325 | Chlorothalonil |
| 174 | _GOICDS_CDS3325 | ThiophanateMethyl |
| 174 | _GOICDS_CDS3325 | Cymoxanil |
| 174 | _GOICDS_CDS3325 | Metrafenone |
| 174 | _GOICDS_CDS3325 | Acetochlor |
| 174 | _GOICDS_CDS3325 | Dimethenamid |
| 174 | _GOICDS_CDS3325 | Metolachlor |
| 174 | _GOICDS_CDS3325 | Metazachlor |
| 174 | _GOICDS_CDS3325 | Glyphosate |
| 174 | _GOICDS_CDS3325 | Glufosinate |
| 174 | _GOICDS_CDS3325 | Sulfosate |
| 174 | _GOICDS_CDS3325 | Fenoxaprop |
| 174 | _GOICDS_CDS3325 | Paraquat |
| 174 | _GOICDS_CDS3325 | Cycloxydim |
| 174 | _GOICDS_CDS3325 | Profoxydim |
| 174 | _GOICDS_CDS3325 | Sethoxydim |
| 174 | _GOICDS_CDS3325 | Tepraloxydim |
| 174 | _GOICDS_CDS3325 | Pendimethalin |
| 174 | _GOICDS_CDS3325 | Acifluorfen |
| 174 | _GOICDS_CDS3325 | Imazamethabenz |
| 174 | _GOICDS_CDS3325 | Imazamox |
| 174 | _GOICDS_CDS3325 | Imazapic |
| 174 | _GOICDS_CDS3325 | Imazapyr |
| 174 | _GOICDS_CDS3325 | Imazaquin |
| 174 | _GOICDS_CDS3325 | Imazethapyr |
| 174 | _GOICDS_CDS3325 | 2,4-D |
| 174 | _GOICDS_CDS3325 | Chloridazon |
| 174 | _GOICDS_CDS3325 | Picloram |
| 174 | _GOICDS_CDS3325 | Picolinafen |
| 174 | _GOICDS_CDS3325 | Cyclosulfamuron |
| 174 | _GOICDS_CDS3325 | Triflusulfuron |
| 174 | _GOICDS_CDS3325 | Atrazine |
| 174 | _GOICDS_CDS3325 | Pyroxasulfone |
| 174 | _GOICDS_CDS3325 | Bentazone |
| 174 | _GOICDS_CDS3325 | Cinidon-ethly |
| 174 | _GOICDS_CDS3325 | Cinmethylin |
| 174 | _GOICDS_CDS3325 | Dicamba |
| 174 | _GOICDS_CDS3325 | Diflufenzopyr |
| 174 | _GOICDS_CDS3325 | Quinclorac |
| 174 | _GOICDS_CDS3325 | Quinmerac |
| 174 | _GOICDS_CDS3325 | Mesotrione |
| 174 | _GOICDS_CDS3325 | Saflufenacil |
| 174 | _GOICDS_CDS3325 | Topramezone; |
| 175 | GOICDS_CDS0218 | acephate |
| 175 | GOICDS_CDS0218 | chlorpyrifos |
| 175 | GOICDS_CDS0218 | dimethoate |
| 175 | GOICDS_CDS0218 | methamidophos |
| 175 | GOICDS_CDS0218 | terbufos |
| 175 | GOICDS_CDS0218 | aldicarb |
| 175 | GOICDS_CDS0218 | carbofuran |
| 175 | GOICDS_CDS0218 | bifenthrin |
| 175 | GOICDS_CDS0218 | cypermethrin |
| 175 | GOICDS_CDS0218 | alpha-cypermethrin |
| 175 | GOICDS_CDS0218 | deltamethrin |
| 175 | GOICDS_CDS0218 | lambda-cyhalothrin |
| 175 | GOICDS_CDS0218 | tefluthrin |
| 175 | GOICDS_CDS0218 | flufenoxuron |
| 175 | GOICDS_CDS0218 | teflubenzuron |
| 175 | GOICDS_CDS0218 | spirotetramat; |
| 175 | GOICDS_CDS0218 | clothianidin |
| 175 | GOICDS_CDS0218 | imidacloprid |
| 175 | GOICDS_CDS0218 | thiamethoxam |
| 175 | GOICDS_CDS0218 | endosulfan |
| 175 | GOICDS_CDS0218 | fipronil |
| 175 | GOICDS_CDS0218 | abamectin |
| 175 | GOICDS_CDS0218 | spinosad |
| 175 | GOICDS_CDS0218 | spinetoram |
| 175 | GOICDS_CDS0218 | hydramethylnon; |
| 175 | GOICDS_CDS0218 | chlorfenapyr; |
| 175 | GOICDS_CDS0218 | indoxacarb |
| 175 | GOICDS_CDS0218 | metaflumizone |
| 175 | GOICDS_CDS0218 | flubendiamide |
| 175 | GOICDS_CDS0218 | chlorantraniliprole |
| 175 | GOICDS_CDS0218 | cyazypyr(HGW86) |
| 175 | GOICDS_CDS0218 | Azoxystrobin |
| 175 | GOICDS_CDS0218 | Dimoxystrobin |
| 175 | GOICDS_CDS0218 | Kresoxim-methyl |
| 175 | GOICDS_CDS0218 | Orysastrobin |
| 175 | GOICDS_CDS0218 | Pyraclostrobin |
| 175 | GOICDS_CDS0218 | Trifloxystrobin |
| 175 | GOICDS_CDS0218 | Bixafen |
| 175 | GOICDS_CDS0218 | Boscalid |
| 175 | GOICDS_CDS0218 | Isopyrazam |
| 175 | GOICDS_CDS0218 | Metalaxyl |
| 175 | GOICDS_CDS0218 | Penthiopyrad |
| 175 | GOICDS_CDS0218 | 3-Difluoromethyl-1- |
| | | methyl-1H-pyrazole- |
| | | 4-carboxylic |
| | | acid(2′,4′,5′-trifluoro- |
| | | biphenyl-2-yl)-amide |
| 175 | GOICDS_CDS0218 | Dimethomorph |
| 175 | GOICDS_CDS0218 | Difenoconazole |
| 175 | GOICDS_CDS0218 | Epoxiconazole |
| 175 | GOICDS_CDS0218 | Fluquinconazole |
| 175 | GOICDS_CDS0218 | Metconazol |
| 175 | GOICDS_CDS0218 | Propiconazole |
| 175 | GOICDS_CDS0218 | Prothioconazole |
| 175 | GOICDS_CDS0218 | Tebuconazole |
| 175 | GOICDS_CDS0218 | Triticonazole |
| 175 | GOICDS_CDS0218 | Prochloraz |
| 175 | GOICDS_CDS0218 | Carbendazim |
| 175 | GOICDS_CDS0218 | Cyprodinil |
| 175 | GOICDS_CDS0218 | Pyrimethanil |
| 175 | GOICDS_CDS0218 | Fenpropimorph |
| 175 | GOICDS_CDS0218 | Tridemorph |
| 175 | GOICDS_CDS0218 | Iprodione |
| 175 | GOICDS_CDS0218 | 5-ethyl-6-octyl-[1,2,4]triazolo[1, |
| | | 5-a]pyrimidine- |
| | | 7-ylamine |
| 175 | GOICDS_CDS0218 | Mancozeb |
| 175 | GOICDS_CDS0218 | Maneb |
| 175 | GOICDS_CDS0218 | Metiram |
| 175 | GOICDS_CDS0218 | Dithianon |
| 175 | GOICDS_CDS0218 | Chlorothalonil |
| 175 | GOICDS_CDS0218 | ThiophanateMethyl |
| 175 | GOICDS_CDS0218 | Cymoxanil |
| 175 | GOICDS_CDS0218 | Metrafenone |
| 175 | GOICDS_CDS0218 | Acetochlor |
| 175 | GOICDS_CDS0218 | Dimethenamid |
| 175 | GOICDS_CDS0218 | Metolachlor |
| 175 | GOICDS_CDS0218 | Metazachlor |
| 175 | GOICDS_CDS0218 | Glyphosate |
| 175 | GOICDS_CDS0218 | Glufosinate |
| 175 | GOICDS_CDS0218 | Sulfosate |
| 175 | GOICDS_CDS0218 | Fenoxaprop |
| 175 | GOICDS_CDS0218 | Paraquat |
| 175 | GOICDS_CDS0218 | Cycloxydim |
| 175 | GOICDS_CDS0218 | Profoxydim |
| 175 | GOICDS_CDS0218 | Sethoxydim |
| 175 | GOICDS_CDS0218 | Tepraloxydim |
| 175 | GOICDS_CDS0218 | Pendimethalin |
| 175 | GOICDS_CDS0218 | Acifluorfen |
| 175 | GOICDS_CDS0218 | Imazamethabenz |
| 175 | GOICDS_CDS0218 | Imazamox |
| 175 | GOICDS_CDS0218 | Imazapic |
| 175 | GOICDS_CDS0218 | Imazapyr |
| 175 | GOICDS_CDS0218 | Imazaquin |
| 175 | GOICDS_CDS0218 | Imazethapyr |
| 175 | GOICDS_CDS0218 | 2,4-D |
| 175 | GOICDS_CDS0218 | Chloridazon |
| 175 | GOICDS_CDS0218 | Picloram |
| 175 | GOICDS_CDS0218 | Picolinafen |
| 175 | GOICDS_CDS0218 | Cyclosulfamuron |
| 175 | GOICDS_CDS0218 | Triflusulfuron |
| 175 | GOICDS_CDS0218 | Atrazine |
| 175 | GOICDS_CDS0218 | Pyroxasulfone |
| 175 | GOICDS_CDS0218 | Bentazone |
| 175 | GOICDS_CDS0218 | Cinidon-ethly |
| 175 | GOICDS_CDS0218 | Cinmethylin |
| 175 | GOICDS_CDS0218 | Dicamba |
| 175 | GOICDS_CDS0218 | Diflufenzopyr |
| 175 | GOICDS_CDS0218 | Quinclorac |
| 175 | GOICDS_CDS0218 | Quinmerac |
| 175 | GOICDS_CDS0218 | Mesotrione |
| 175 | GOICDS_CDS0218 | Saflufenacil |
| 175 | GOICDS_CDS0218 | Topramezone; |
| 176 | GOICDS_CDS1536 | acephate |
| 176 | GOICDS_CDS1536 | chlorpyrifos |
| 176 | GOICDS_CDS1536 | dimethoate |
| 176 | GOICDS_CDS1536 | methamidophos |
| 176 | GOICDS_CDS1536 | terbufos |
| 176 | GOICDS_CDS1536 | aldicarb |
| 176 | GOICDS_CDS1536 | carbofuran |
| 176 | GOICDS_CDS1536 | bifenthrin |
| 176 | GOICDS_CDS1536 | cypermethrin |
| 176 | GOICDS_CDS1536 | alpha-cypermethrin |
| 176 | GOICDS_CDS1536 | deltamethrin |
| 176 | GOICDS_CDS1536 | lambda-cyhalothrin |
| 176 | GOICDS_CDS1536 | tefluthrin |
| 176 | GOICDS_CDS1536 | flufenoxuron |
| 176 | GOICDS_CDS1536 | teflubenzuron |
| 176 | GOICDS_CDS1536 | spirotetramat; |
| 176 | GOICDS_CDS1536 | clothianidin |
| 176 | GOICDS_CDS1536 | imidacloprid |
| 176 | GOICDS_CDS1536 | thiamethoxam |
| 176 | GOICDS_CDS1536 | endosulfan |
| 176 | GOICDS_CDS1536 | fipronil |
| 176 | GOICDS_CDS1536 | abamectin |
| 176 | GOICDS_CDS1536 | spinosad |
| 176 | GOICDS_CDS1536 | spinetoram |
| 176 | GOICDS_CDS1536 | hydramethylnon; |
| 176 | GOICDS_CDS1536 | Chlorfenapyr; |
| 176 | GOICDS_CDS1536 | indoxacarb |
| 176 | GOICDS_CDS1536 | metaflumizone |
| 176 | GOICDS_CDS1536 | flubendiamide |
| 176 | GOICDS_CDS1536 | chlorantraniliprole |
| 176 | GOICDS_CDS1536 | cyazypyr(HGW86) |
| 176 | GOICDS_CDS1536 | Azoxystrobin |
| 176 | GOICDS_CDS1536 | Dimoxystrobin |
| 176 | GOICDS_CDS1536 | Kresoxim-methyl |
| 176 | GOICDS_CDS1536 | Orysastrobin |
| 176 | GOICDS_CDS1536 | Pyraclostrobin |
| 176 | GOICDS_CDS1536 | Trifloxystrobin |
| 176 | GOICDS_CDS1536 | Bixafen |
| 176 | GOICDS_CDS1536 | Boscalid |
| 176 | GOICDS_CDS1536 | Isopyrazam |
| 176 | GOICDS_CDS1536 | Metalaxyl |
| 176 | GOICDS_CDS1536 | Penthiopyrad |
| 176 | GOICDS_CDS1536 | 3-Difluoromethyl-1- |
| | | methyl-1H-pyrazole- |
| | | 4-carboxylic |
| | | acid(2′,4′,5′-trifluoro- |
| | | biphenyl-2-yl)-amide |
| 176 | GOICDS_CDS1536 | Dimethomorph |
| 176 | GOICDS_CDS1536 | Difenoconazole |
| 176 | GOICDS_CDS1536 | Epoxiconazole |
| 176 | GOICDS_CDS1536 | Fluquinconazole |
| 176 | GOICDS_CDS1536 | Metconazol |
| 176 | GOICDS_CDS1536 | Propiconazole |
| 176 | GOICDS_CDS1536 | Prothioconazole |
| 176 | GOICDS_CDS1536 | Tebuconazole |
| 176 | GOICDS_CDS1536 | Triticonazole |
| 176 | GOICDS_CDS1536 | Prochloraz |
| 176 | GOICDS_CDS1536 | Carbendazim |
| 176 | GOICDS_CDS1536 | Cyprodinil |
| 176 | GOICDS_CDS1536 | Pyrimethanil |
| 176 | GOICDS_CDS1536 | Fenpropimorph |
| 176 | GOICDS_CDS1536 | Tridemorph |
| 176 | GOICDS_CDS1536 | Iprodione |
| 176 | GOICDS_CDS1536 | 5-ethyl-6-octyl-[1,2,4]triazolo[1, |
| | | 5-a]pyrimidine- |
| | | 7-ylamine |
| 176 | GOICDS_CDS1536 | Mancozeb |
| 176 | GOICDS_CDS1536 | Maneb |
| 176 | GOICDS_CDS1536 | Metiram |
| 176 | GOICDS_CDS1536 | Dithianon |
| 176 | GOICDS_CDS1536 | Chlorothalonil |
| 176 | GOICDS_CDS1536 | ThiophanateMethyl |
| 176 | GOICDS_CDS1536 | Cymoxanil |
| 176 | GOICDS_CDS1536 | Metrafenone |
| 176 | GOICDS_CDS1536 | Acetochlor |
| 176 | GOICDS_CDS1536 | Dimethenamid |
| 176 | GOICDS_CDS1536 | Metolachlor |
| 176 | GOICDS_CDS1536 | Metazachlor |
| 176 | GOICDS_CDS1536 | Glyphosate |
| 176 | GOICDS_CDS1536 | Glufosinate |
| 176 | GOICDS_CDS1536 | Sulfosate |
| 176 | GOICDS_CDS1536 | Fenoxaprop |
| 176 | GOICDS_CDS1536 | Paraquat |
| 176 | GOICDS_CDS1536 | Cycloxydim |
| 176 | GOICDS_CDS1536 | Profoxydim |
| 176 | GOICDS_CDS1536 | Sethoxydim |
| 176 | GOICDS_CDS1536 | Tepraloxydim |
| 176 | GOICDS_CDS1536 | Pendimethalin |
| 176 | GOICDS_CDS1536 | Acifluorfen |
| 176 | GOICDS_CDS1536 | Imazamethabenz |
| 176 | GOICDS_CDS1536 | Imazamox |
| 176 | GOICDS_CDS1536 | Imazapic |
| 176 | GOICDS_CDS1536 | Imazapyr |
| 176 | GOICDS_CDS1536 | Imazaquin |
| 176 | GOICDS_CDS1536 | Imazethapyr |
| 176 | GOICDS_CDS1536 | 2,4-D |
| 176 | GOICDS_CDS1536 | Chloridazon |
| 176 | GOICDS_CDS1536 | Picloram |
| 176 | GOICDS_CDS1536 | Picolinafen |
| 176 | GOICDS_CDS1536 | Cyclosulfamuron |
| 176 | GOICDS_CDS1536 | Triflusulfuron |
| 176 | GOICDS_CDS1536 | Atrazine |
| 176 | GOICDS_CDS1536 | Pyroxasulfone |
| 176 | GOICDS_CDS1536 | Bentazone |
| 176 | GOICDS_CDS1536 | Cinidon-ethly |
| 176 | GOICDS_CDS1536 | Cinmethylin |
| 176 | GOICDS_CDS1536 | Dicamba |
| 176 | GOICDS_CDS1536 | Diflufenzopyr |
| 176 | GOICDS_CDS1536 | Quinclorac |
| 176 | GOICDS_CDS1536 | Quinmerac |
| 176 | GOICDS_CDS1536 | Mesotrione |
| 176 | GOICDS_CDS1536 | Saflufenacil |
| 176 | GOICDS_CDS1536 | Topramezone; |
| 177 | | acephate |
| 177 | | chlorpyrifos |
| 177 | | dimethoate |
| 177 | | methamidophos |
| 177 | | terbufos |
| 177 | | aldicarb |
| 177 | | carbofuran |
| 177 | | bifenthrin |
| 177 | | cypermethrin |
| 177 | | alpha-cypermethrin |
| 177 | | deltamethrin |
| 177 | | lambda-cyhalothrin |
| 177 | | tefluthrin |
| 177 | | flufenoxuron |
| 177 | | teflubenzuron |
| 177 | | spirotetramat; |
| 177 | | clothianidin |
| 177 | | imidacloprid |
| 177 | | thiamethoxam |
| 177 | | endosulfan |
| 177 | | fipronil |
| 177 | | abamectin |
| 177 | | spinosad |
| 177 | | spinetoram |
| 177 | | hydramethylnon; |
| 177 | | chlorfenapyr; |
| 177 | | indoxacarb |
| 177 | | metaflumizone |
| 177 | | flubendiamide |
| 177 | | chlorantraniliprole |
| 177 | | cyazypyr(HGW86) |
| 177 | | Azoxystrobin |
| 177 | | Dimoxystrobin |
| 177 | | Kresoxim-methyl |
| 177 | | Orysastrobin |
| 177 | | Pyraclostrobin |
| 177 | | Trifloxystrobin |
| 177 | | Bixafen |
| 177 | | Boscalid |
| 177 | | Isopyrazam |
| 177 | | Metalaxyl |
| 177 | | Penthiopyrad |
| 177 | | 3-Difluoromethyl-1- |
| | | methyl-1H-pyrazole- |
| | | 4-carboxylic |
| | | acid(2′,4′,5′-trifluoro- |
| | | biphenyl-2-yl)-amide |
| 177 | | Dimethomorph |
| 177 | | Difenoconazole |
| 177 | | Epoxiconazole |
| 177 | | Fluquinconazole |
| 177 | | Metconazol |
| 177 | | Propiconazole |
| 177 | | Prothioconazole |
| 177 | | Tebuconazole |
| 177 | | Triticonazole |
| 177 | | Prochloraz |
| 177 | | Carbendazim |
| 177 | | Cyprodinil |
| 177 | | Pyrimethanil |
| 177 | | Fenpropimorph |
| 177 | | Tridemorph |
| 177 | | Iprodione |
| 177 | | 5-ethyl-6-octyl-[1,2,4]triazolo[1, |
| | | 5-a]pyrimidine- |
| | | 7-ylamine |
| 177 | | Mancozeb |
| 177 | | Maneb |
| 177 | | Metiram |
| 177 | | Dithianon |
| 177 | | Chlorothalonil |
| 177 | | ThiophanateMethyl |
| 177 | | Cymoxanil |
| 177 | | Metrafenone |
| 177 | | Acetochlor |
| 177 | | Dimethenamid |
| 177 | | Metolachlor |
| 177 | | Metazachlor |
| 177 | | Glyphosate |
| 177 | | Glufosinate |
| 177 | | Sulfosate |
| 177 | | Fenoxaprop |
| 177 | | Paraquat |
| 177 | | Cycloxydim |
| 177 | | Profoxydim |
| 177 | | Sethoxydim |
| 177 | | Tepraloxydim |
| 177 | | Pendimethalin |
| 177 | | Acifluorfen |
| 177 | | Imazamethabenz |
| 177 | | Imazamox |
| 177 | | Imazapic |
| 177 | | Imazapyr |
| 177 | | Imazaquin |
| 177 | | Imazethapyr |
| 177 | | 2,4-D |
| 177 | | Chloridazon |
| 177 | | Picloram |
| 177 | | Picolinafen |
| 177 | | Cyclosulfamuron |
| 177 | | Triflusulfuron |
| 177 | | Atrazine |
| 177 | | Pyroxasulfone |
| 177 | | Bentazone |
| 177 | | Cinidon-ethly |
| 177 | | Cinmethylin |
| 177 | | Dicamba |
| 177 | | Diflufenzopyr |
| 177 | | Quinclorac |
| 177 | | Quinmerac |
| 177 | | Mesotrione |
| 177 | | Saflufenacil |
| 177 | | Topramezone; |
| 178 | GOICDS_CDS3074 | acephate |
| 178 | GOICDS_CDS3074 | chlorpyrifos |
| 178 | GOICDS_CDS3074 | dimethoate |
| 178 | GOICDS_CDS3074 | methamidophos |
| 178 | GOICDS_CDS3074 | terbufos |
| 178 | GOICDS_CDS3074 | aldicarb |
| 178 | GOICDS_CDS3074 | carbofuran |
| 178 | GOICDS_CDS3074 | bifenthrin |
| 178 | GOICDS_CDS3074 | cypermethrin |
| 178 | GOICDS_CDS3074 | alpha-cypermethrin |
| 178 | GOICDS_CDS3074 | deltamethrin |
| 178 | GOICDS_CDS3074 | lambda-cyhalothrin |
| 178 | GOICDS_CDS3074 | tefluthrin |
| 178 | GOICDS_CDS3074 | flufenoxuron |
| 178 | GOICDS_CDS3074 | teflubenzuron |
| 178 | GOICDS_CDS3074 | spirotetramat; |
| 178 | GOICDS_CDS3074 | clothianidin |
| 178 | GOICDS_CDS3074 | imidacloprid |
| 178 | GOICDS_CDS3074 | thiamethoxam |
| 178 | GOICDS_CDS3074 | endosulfan |
| 178 | GOICDS_CDS3074 | fipronil |
| 178 | GOICDS_CDS3074 | abamectin |
| 178 | GOICDS_CDS3074 | spinosad |
| 178 | GOICDS_CDS3074 | spinetoram |
| 178 | GOICDS_CDS3074 | hydramethylnon; |
| 178 | GOICDS_CDS3074 | chlorfenapyr; |
| 178 | GOICDS_CDS3074 | indoxacarb |
| 178 | GOICDS_CDS3074 | metaflumizone |
| 178 | GOICDS_CDS3074 | flubendiamide |
| 178 | GOICDS_CDS3074 | chlorantraniliprole |
| 178 | GOICDS_CDS3074 | cyazypyr(HGW86) |
| 178 | GOICDS_CDS3074 | Azoxystrobin |
| 178 | GOICDS_CDS3074 | Dimoxystrobin |
| 178 | GOICDS_CDS3074 | Kresoxim-methyl |
| 178 | GOICDS_CDS3074 | Orysastrobin |
| 178 | GOICDS_CDS3074 | Pyraclostrobin |
| 178 | GOICDS_CDS3074 | Trifloxystrobin |
| 178 | GOICDS_CDS3074 | Bixafen |
| 178 | GOICDS_CDS3074 | Boscalid |
| 178 | GOICDS_CDS3074 | Isopyrazam |
| 178 | GOICDS_CDS3074 | Metalaxyl |
| 178 | GOICDS_CDS3074 | Penthiopyrad |
| 178 | GOICDS_CDS3074 | 3-Difluoromethyl-1- |
| | | methyl-1H-pyrazole- |
| | | 4-carboxylic |
| | | acid(2′,4′,5′-trifluoro- |
| | | biphenyl-2-yl)-amide |
| 178 | GOICDS_CDS3074 | Dimethomorph |
| 178 | GOICDS_CDS3074 | Difenoconazole |
| 178 | GOICDS_CDS3074 | Epoxiconazole |
| 178 | GOICDS_CDS3074 | Fluquinconazole |
| 178 | GOICDS_CDS3074 | Metconazol |
| 178 | GOICDS_CDS3074 | Propiconazole |
| 178 | GOICDS_CDS3074 | Prothioconazole |
| 178 | GOICDS_CDS3074 | Tebuconazole |
| 178 | GOICDS_CDS3074 | Triticonazole |
| 178 | GOICDS_CDS3074 | Prochloraz |
| 178 | GOICDS_CDS3074 | Carbendazim |
| 178 | GOICDS_CDS3074 | Cyprodinil |
| 178 | GOICDS_CDS3074 | Pyrimethanil |
| 178 | GOICDS_CDS3074 | Fenpropimorph |
| 178 | GOICDS_CDS3074 | Tridemorph |
| 178 | GOICDS_CDS3074 | Iprodione |
| 178 | GOICDS_CDS3074 | 5-ethyl-6-octyl-[1,2,4]triazolo[1, |
| | | 5-a]pyrimidine- |
| | | 7-ylamine |
| 178 | GOICDS_CDS3074 | Mancozeb |
| 178 | GOICDS_CDS3074 | Maneb |
| 178 | GOICDS_CDS3074 | Metiram |
| 178 | GOICDS_CDS3074 | Dithianon |
| 178 | GOICDS_CDS3074 | Chlorothalonil |
| 178 | GOICDS_CDS3074 | ThiophanateMethyl |
| 178 | GOICDS_CDS3074 | Cymoxanil |
| 178 | GOICDS_CDS3074 | Metrafenone |
| 178 | GOICDS_CDS3074 | Acetochlor |
| 178 | GOICDS_CDS3074 | Dimethenamid |
| 178 | GOICDS_CDS3074 | Metolachlor |
| 178 | GOICDS_CDS3074 | Metazachlor |
| 178 | GOICDS_CDS3074 | Glyphosate |
| 178 | GOICDS_CDS3074 | Glufosinate |
| 178 | GOICDS_CDS3074 | Sulfosate |
| 178 | GOICDS_CDS3074 | Fenoxaprop |
| 178 | GOICDS_CDS3074 | Paraquat |
| 178 | GOICDS_CDS3074 | Cycloxydim |
| 178 | GOICDS_CDS3074 | Profoxydim |
| 178 | GOICDS_CDS3074 | Sethoxydim |
| 178 | GOICDS_CDS3074 | Tepraloxydim |
| 178 | GOICDS_CDS3074 | Pendimethalin |
| 178 | GOICDS_CDS3074 | Acifluorfen |
| 178 | GOICDS_CDS3074 | Imazamethabenz |
| 178 | GOICDS_CDS3074 | Imazamox |
| 178 | GOICDS_CDS3074 | Imazapic |
| 178 | GOICDS_CDS3074 | Imazapyr |
| 178 | GOICDS_CDS3074 | Imazaquin |
| 178 | GOICDS_CDS3074 | Imazethapyr |
| 178 | GOICDS_CDS3074 | 2,4-D |
| 178 | GOICDS_CDS3074 | Chloridazon |
| 178 | GOICDS_CDS3074 | Picloram |
| 178 | GOICDS_CDS3074 | Picolinafen |
| 178 | GOICDS_CDS3074 | Cyclosulfamuron |
| 178 | GOICDS_CDS3074 | Triflusulfuron |
| 178 | GOICDS_CDS3074 | Atrazine |
| 178 | GOICDS_CDS3074 | Pyroxasulfone |
| 178 | GOICDS_CDS3074 | Bentazone |
| 178 | GOICDS_CDS3074 | Cinidon-ethly |
| 178 | GOICDS_CDS3074 | Cinmethylin |
| 178 | GOICDS_CDS3074 | Dicamba |
| 178 | GOICDS_CDS3074 | Diflufenzopyr |
| 178 | GOICDS_CDS3074 | Quinclorac |
| 178 | GOICDS_CDS3074 | Quinmerac |
| 178 | GOICDS_CDS3074 | Mesotrione |
| 178 | GOICDS_CDS3074 | Saflufenacil |
| 178 | GOICDS_CDS3074 | Topramezone; |
| 182 | | acephate |
| 182 | | chlorpyrifos |
| 182 | | dimethoate |
| 182 | | methamidophos |
| 182 | | terbufos |
| 182 | | aldicarb |
| 182 | | carbofuran |
| 182 | | bifenthrin |
| 182 | | cypermethrin |
| 182 | | alpha-cypermethrin |
| 182 | | deltamethrin |
| 182 | | lambda-cyhalothrin |
| 182 | | tefluthrin |
| 182 | | flufenoxuron |
| 182 | | teflubenzuron |
| 182 | | spirotetramat; |
| 182 | | clothianidin |
| 182 | | imidacloprid |
| 182 | | thiamethoxam |
| 182 | | endosulfan |
| 182 | | fipronil |
| 182 | | abamectin |
| 182 | | spinosad |
| 182 | | spinetoram |
| 182 | | hydramethylnon; |
| 182 | | chlorfenapyr; |
| 182 | | indoxacarb |
| 182 | | metaflumizone |
| 182 | | flubendiamide |
| 182 | | chlorantraniliprole |
| 182 | | cyazypyr(HGW86) |
| 182 | | Azoxystrobin |
| 182 | | Dimoxystrobin |
| 182 | | Kresoxim-methyl |
| 182 | | Orysastrobin |
| 182 | | Pyraclostrobin |
| 182 | | Trifloxystrobin |
| 182 | | Bixafen |
| 182 | | Boscalid |
| 182 | | Isopyrazam |
| 182 | | Metalaxyl |
| 182 | | Penthiopyrad |
| 182 | | 3-Difluoromethyl-1- |
| | | methyl-1H-pyrazole- |
| | | 4-carboxylic |
| | | acid(2′,4′,5′-trifluoro- |
| | | biphenyl-2-yl)-amide |
| 182 | | Dimethomorph |
| 182 | | Difenoconazole |
| 182 | | Epoxiconazole |
| 182 | | Fluquinconazole |
| 182 | | Metconazol |
| 182 | | Propiconazole |
| 182 | | Prothioconazole |
| 182 | | Tebuconazole |
| 182 | | Triticonazole |
| 182 | | Prochloraz |
| 182 | | Carbendazim |
| 182 | | Cyprodinil |
| 182 | | Pyrimethanil |
| 182 | | Fenpropimorph |
| 182 | | Tridemorph |
| 182 | | Iprodione |
| 182 | | 5-ethyl-6-octyl-[1,2,4]triazolo[1, |
| | | 5-a]pyrimidine- |
| | | 7-ylamine |
| 182 | | Mancozeb |
| 182 | | Maneb |
| 182 | | Metiram |
| 182 | | Dithianon |
| 182 | | Chlorothalonil |
| 182 | | ThiophanateMethyl |
| 182 | | Cymoxanil |
| 182 | | Metrafenone |
| 182 | | Acetochlor |
| 182 | | Dimethenamid |
| 182 | | Metolachlor |
| 182 | | Metazachlor |
| 182 | | Glyphosate |
| 182 | | Glufosinate |
| 182 | | Sulfosate |
| 182 | | Fenoxaprop |
| 182 | | Paraquat |
| 182 | | Cycloxydim |
| 182 | | Profoxydim |
| 182 | | Sethoxydim |
| 182 | | Tepraloxydim |
| 182 | | Pendimethalin |
| 182 | | Acifluorfen |
| 182 | | Imazamethabenz |
| 182 | | Imazamox |
| 182 | | Imazapic |
| 182 | | Imazapyr |
| 182 | | Imazaquin |
| 182 | | Imazethapyr |
| 182 | | 2,4-D |
| 182 | | Chloridazon |
| 182 | | Picloram |
| 182 | | Picolinafen |
| 182 | | Cyclosulfamuron |
| 182 | | Triflusulfuron |
| 182 | | Atrazine |
| 182 | | Pyroxasulfone |
| 182 | | Bentazone |
| 182 | | Cinidon-ethly |
| 182 | | Cinmethylin |
| 182 | | Dicamba |
| 182 | | Diflufenzopyr |
| 182 | | Quinclorac |
| 182 | | Quinmerac |
| 182 | | Mesotrione |
| 182 | | Saflufenacil |
| 182 | | Topramezone; |
| 186 | | acephate |
| 186 | | chlorpyrifos |
| 186 | | dimethoate |
| 186 | | methamidophos |
| 186 | | terbufos |
| 186 | | aldicarb |
| 186 | | carbofuran |
| 186 | | bifenthrin |
| 186 | | cypermethrin |
| 186 | | alpha-cypermethrin |
| 186 | | deltamethrin |
| 186 | | lambda-cyhalothrin |
| 186 | | tefluthrin |
| 186 | | flufenoxuron |
| 186 | | teflubenzuron |
| 186 | | spirotetramat; |
| 186 | | clothianidin |
| 186 | | imidacloprid |
| 186 | | thiamethoxam |
| 186 | | endosulfan |
| 186 | | fipronil |
| 186 | | abamectin |
| 186 | | spinosad |
| 186 | | spinetoram |
| 186 | | hydramethylnon; |
| 186 | | chlorfenapyr; |
| 186 | | indoxacarb |
| 186 | | metaflumizone |
| 186 | | flubendiamide |
| 186 | | chlorantraniliprole |
| 186 | | cyazypyr(HGW86) |
| 186 | | Azoxystrobin |
| 186 | | Dimoxystrobin |
| 186 | | Kresoxim-methyl |
| 186 | | Orysastrobin |
| 186 | | Pyraclostrobin |
| 186 | | Trifloxystrobin |
| 186 | | Bixafen |
| 186 | | Boscalid |
| 186 | | Isopyrazam |
| 186 | | Metalaxyl |
| 186 | | Penthiopyrad |
| 186 | | 3-Difiuoromethyl-1- |
| | | methyl-1H-pyrazole- |
| | | 4- |
| | | carboxylicacid(2′, |
| | | 4′,5′-trifluoro- |
| | | biphenyl-2-yl)-amide |
| 186 | | Dimethomorph |
| 186 | | Difenoconazole |
| 186 | | Epoxiconazole |
| 186 | | Fluquinconazole |
| 186 | | Metconazol |
| 186 | | Propiconazole |
| 186 | | Prothioconazole |
| 186 | | Tebuconazole |
| 186 | | Triticonazole |
| 186 | | Prochloraz |
| 186 | | Carbendazim |
| 186 | | Cyprodinil |
| 186 | | Pyrimethanil |
| 186 | | Fenpropimorph |
| 186 | | Tridemorph |
| 186 | | Iprodione |
| 186 | | 5-ethyl-6-octyl- |
| | | [1,2,4]triazolo[1,5- |
| | | a]pyrimidine-7- |
| | | ylamine |
| 186 | | Mancozeb |
| 186 | | Maneb |
| 186 | | Metiram |
| 186 | | Dithianon |
| 186 | | Chlorothalonil |
| 186 | | ThiophanateMethyl |
| 186 | | Cymoxanil |
| 186 | | Metrafenone |
| 186 | | Acetochlor |
| 186 | | Dimethenamid |
| 186 | | Metolachlor |
| 186 | | Metazachlor |
| 186 | | Glyphosate |
| 186 | | Glufosinate |
| 186 | | Sulfosate |
| 186 | | Fenoxaprop |
| 186 | | Paraquat |
| 186 | | Cycloxydim |
| 186 | | Profoxydim |
| 186 | | Sethoxydim |
| 186 | | Tepraloxydim |
| 186 | | Pendimethalin |
| 186 | | Acifluorfen |
| 186 | | Imazamethabenz |
| 186 | | Imazamox |
| 186 | | Imazapic |
| 186 | | Imazapyr |
| 186 | | Imazaquin |
| 186 | | Imazethapyr |
| 186 | | 2,4-D |
| 186 | | Chloridazon |
| 186 | | Picloram |
| 186 | | Picolinafen |
| 186 | | Cyclosulfamuron |
| 186 | | Triflusulfuron |
| 186 | | Atrazine |
| 186 | | Pyroxasulfone |
| 186 | | Bentazone |
| 186 | | Cinidon-ethly |
| 186 | | Cinmethylin |
| 186 | | Dicamba |
| 186 | | Diflufenzopyr |
| 186 | | Quinclorac |
| 186 | | Quinmerac |
| 186 | | Mesotrione |
| 186 | | Saflufenacil |
| 186 | | Topramezone; |
| 187 | | acephate |
| 187 | | chlorpyrifos |
| 187 | | dimethoate |
| 187 | | methamidophos |
| 187 | | terbufos |
| 187 | | aldicarb |
| 187 | | carbofuran |
| 187 | | bifenthrin |
| 187 | | cypermethrin |
| 187 | | alpha-cypermethrin |
| 187 | | deltamethrin |
| 187 | | lambda-cyhalothrin |
| 187 | | tefluthrin |
| 187 | | flufenoxuron |
| 187 | | teflubenzuron |
| 187 | | spirotetramat; |
| 187 | | clothianidin |
| 187 | | imidacloprid |
| 187 | | thiamethoxam |
| 187 | | endosulfan |
| 187 | | fipronil |
| 187 | | abamectin |
| 187 | | spinosad |
| 187 | | spinetoram |
| 187 | | hydramethylnon; |
| 187 | | chlorfenapyr; |
| 187 | | indoxacarb |
| 187 | | metaflumizone |
| 187 | | flubendiamide |
| 187 | | chlorantraniliprole |
| 187 | | cyazypyr(HGW86) |
| 187 | | Azoxystrobin |
| 187 | | Dimoxystrobin |
| 187 | | Kresoxim-methyl |
| 187 | | Orysastrobin |
| 187 | | Pyraclostrobin |
| 187 | | Trifloxystrobin |
| 187 | | Bixafen |
| 187 | | Boscalid |
| 187 | | Isopyrazam |
| 187 | | Metalaxyl |
| 187 | | Penthiopyrad |
| 187 | | 3-Difluoromethyl-1- |
| | | methyl-1H-pyrazole- |
| | | 4-carboxylic |
| | | acid(2′,4′,5′-trifluoro- |
| | | biphenyl-2-yl)-amide |
| 187 | | Dimethomorph |
| 187 | | Difenoconazole |
| 187 | | Epoxiconazole |
| 187 | | Fluquinconazole |
| 187 | | Metconazol |
| 187 | | Propiconazole |
| 187 | | Prothioconazole |
| 187 | | Tebuconazole |
| 187 | | Triticonazole |
| 187 | | Prochloraz |
| 187 | | Carbendazim |
| 187 | | Cyprodinil |
| 187 | | Pyrimethanil |
| 187 | | Fenpropimorph |
| 187 | | Tridemorph |
| 187 | | Iprodione |
| 187 | | 5-ethyl-6-octyl-[1,2,4]triazolo[1, |
| | | 5-a]pyrimidine- |
| | | 7-ylamine |
| 187 | | Mancozeb |
| 187 | | Maneb |
| 187 | | Metiram |
| 187 | | Dithianon |
| 187 | | Chlorothalonil |
| 187 | | ThiophanateMethyl |
| 187 | | Cymoxanil |
| 187 | | Metrafenone |
| 187 | | Acetochlor |
| 187 | | Dimethenamid |
| 187 | | Metolachlor |
| 187 | | Metazachlor |
| 187 | | Glyphosate |
| 187 | | Glufosinate |
| 187 | | Sulfosate |
| 187 | | Fenoxaprop |
| 187 | | Paraquat |
| 187 | | Cycloxydim |
| 187 | | Profoxydim |
| 187 | | Sethoxydim |
| 187 | | Tepraloxydim |
| 187 | | Pendimethalin |
| 187 | | Acifluorfen |
| 187 | | Imazamethabenz |
| 187 | | Imazamox |
| 187 | | Imazapic |
| 187 | | Imazapyr |
| 187 | | Imazaquin |
| 187 | | Imazethapyr |
| 187 | | 2,4-D |
| 187 | | Chloridazon |
| 187 | | Picloram |
| 187 | | Picolinafen |
| 187 | | Cyclosulfamuron |
| 187 | | Triflusulfuron |
| 187 | | Atrazine |
| 187 | | Pyroxasulfone |
| 187 | | Bentazone |
| 187 | | Cinidon-ethly |
| 187 | | Cinmethylin |
| 187 | | Dicamba |
| 187 | | Diflufenzopyr |
| 187 | | Quinclorac |
| 187 | | Quinmerac |
| 187 | | Mesotrione |
| 187 | | Saflufenacil |
| 187 | | Topramezone; |
| 188 | | acephate |
| 188 | | chlorpyrifos |
| 188 | | dimethoate |
| 188 | | methamidophos |
| 188 | | terbufos |
| 188 | | aldicarb |
| 188 | | carbofuran |
| 188 | | bifenthrin |
| 188 | | cypermethrin |
| 188 | | alpha-cypermethrin |
| 188 | | deltamethrin |
| 188 | | lambda-cyhalothrin |
| 188 | | tefluthrin |
| 188 | | flufenoxuron |
| 188 | | teflubenzuron |
| 188 | | spirotetramat; |
| 188 | | clothianidin |
| 188 | | imidacloprid |
| 188 | | thiamethoxam |
| 188 | | endosulfan |
| 188 | | fipronil |
| 188 | | abamectin |
| 188 | | spinosad |
| 188 | | spinetoram |
| 188 | | hydramethylnon; |
| 188 | | chlorfenapyr; |
| 188 | | indoxacarb |
| 188 | | metaflumizone |
| 188 | | flubendiamide |
| 188 | | chlorantraniliprole |
| 188 | | cyazypyr(HGW86) |
| 188 | | Azoxystrobin |
| 188 | | Dimoxystrobin |
| 188 | | Kresoxim-methyl |
| 188 | | Orysastrobin |
| 188 | | Pyraclostrobin |
| 188 | | Trifloxystrobin |
| 188 | | Bixafen |
| 188 | | Boscalid |
| 188 | | Isopyrazam |
| 188 | | Metalaxyl |
| 188 | | Penthiopyrad |
| 188 | | 3-Difluoromethyl-1- |
| | | methyl-1H-pyrazole- |
| | | 4-carboxylic |
| | | acid(2′,4′,5′-trifluoro- |
| | | biphenyl-2-yl)-amide |
| 188 | | Dimethomorph |
| 188 | | Difenoconazole |
| 188 | | Epoxiconazole |
| 188 | | Fluquinconazole |
| 188 | | Metconazol |
| 188 | | Propiconazole |
| 188 | | Prothioconazole |
| 188 | | Tebuconazole |
| 188 | | Triticonazole |
| 188 | | Prochloraz |
| 188 | | Carbendazim |
| 188 | | Cyprodinil |
| 188 | | Pyrimethanil |
| 188 | | Fenpropimorph |
| 188 | | Tridemorph |
| 188 | | Iprodione |
| 188 | | 5-ethyl-6-octyl-[1,2,4]triazolo[1, |
| | | 5-a]pyrimidine- |
| | | 7-ylamine |
| 188 | | Mancozeb |
| 188 | | Maneb |
| 188 | | Metiram |
| 188 | | Dithianon |
| 188 | | Chlorothalonil |
| 188 | | ThiophanateMethyl |
| 188 | | Cymoxanil |
| 188 | | Metrafenone |
| 188 | | Acetochlor |
| 188 | | Dimethenamid |
| 188 | | Metolachlor |
| 188 | | Metazachlor |
| 188 | | Glyphosate |
| 188 | | Glufosinate |
| 188 | | Sulfosate |
| 188 | | Fenoxaprop |
| 188 | | Paraquat |
| 188 | | Cycloxydim |
| 188 | | Profoxydim |
| 188 | | Sethoxydim |
| 188 | | Tepraloxydim |
| 188 | | Pendimethalin |
| 188 | | Acifluorfen |
| 188 | | Imazamethabenz |
| 188 | | Imazamox |
| 188 | | Imazapic |
| 188 | | Imazapyr |
| 188 | | Imazaquin |
| 188 | | Imazethapyr |
| 188 | | 2,4-D |
| 188 | | Chloridazon |
| 188 | | Picloram |
| 188 | | Picolinafen |
| 188 | | Cyclosulfamuron |
| 188 | | Triflusulfuron |
| 188 | | Atrazine |
| 188 | | Pyroxasulfone |
| 188 | | Bentazone |
| 188 | | Cinidon-ethly |
| 188 | | Cinmethylin |
| 188 | | Dicamba |
| 188 | | Diflufenzopyr |
| 188 | | Quinclorac |
| 188 | | Quinmerac |
| 188 | | Mesotrione |
| 188 | | Saflufenacil |
| 188 | | Topramezone; |
| 189 | _CDS3298 | acephate |
| 189 | _CDS3298 | chlorpyrifos |
| 189 | _CDS3298 | dimethoate |
| 189 | _CDS3298 | methamidophos |
| 189 | _CDS3298 | terbufos |
| 189 | _CDS3298 | aldicarb |
| 189 | _CDS3298 | carbofuran |
| 189 | _CDS3298 | bifenthrin |
| 189 | _CDS3298 | cypermethrin |
| 189 | _CDS3298 | alpha-cypermethrin |
| 189 | _CDS3298 | deltamethrin |
| 189 | _CDS3298 | lambda-cyhalothrin |
| 189 | _CDS3298 | tefluthrin |
| 189 | _CDS3298 | flufenoxuron |
| 189 | _CDS3298 | teflubenzuron |
| 189 | _CDS3298 | spirotetramat; |
| 189 | _CDS3298 | clothianidin |
| 189 | _CDS3298 | imidacloprid |
| 189 | _CDS3298 | thiamethoxam |
| 189 | _CDS3298 | endosulfan |
| 189 | _CDS3298 | fipronil |
| 189 | _CDS3298 | abamectin |
| 189 | _CDS3298 | spinosad |
| 189 | _CDS3298 | spinetoram |
| 189 | _CDS3298 | hydramethylnon; |
| 189 | _CDS3298 | chlorfenapyr; |
| 189 | _CDS3298 | indoxacarb |
| 189 | _CDS3298 | metaflumizone |
| 189 | _CDS3298 | flubendiamide |
| 189 | _CDS3298 | chlorantraniliprole |
| 189 | _CDS3298 | cyazypyr(HGW86) |
| 189 | _CDS3298 | Azoxystrobin |
| 189 | _CDS3298 | Dimoxystrobin |
| 189 | _CDS3298 | Kresoxim-methyl |
| 189 | _CDS3298 | Orysastrobin |
| 189 | _CDS3298 | Pyraclostrobin |
| 189 | _CDS3298 | Trifloxystrobin |
| 189 | _CDS3298 | Bixafen |
| 189 | _CDS3298 | Boscalid |
| 189 | _CDS3298 | Isopyrazam |
| 189 | _CDS3298 | Metalaxyl |
| 189 | _CDS3298 | Penthiopyrad |
| 189 | _CDS3298 | 3-Difluoromethyl-1- |
| | | methyl-1H-pyrazole- |
| | | 4-carboxylic |
| | | acid(2′,4′,5′-trifluoro- |
| | | biphenyl-2-yl)-amide |
| 189 | _CDS3298 | Dimethomorph |
| 189 | _CDS3298 | Difenoconazole |
| 189 | _CDS3298 | Epoxiconazole |
| 189 | _CDS3298 | Fluquinconazole |
| 189 | _CDS3298 | Metconazol |
| 189 | _CDS3298 | Propiconazole |
| 189 | _CDS3298 | Prothioconazole |
| 189 | _CDS3298 | Tebuconazole |
| 189 | _CDS3298 | Triticonazole |
| 189 | _CDS3298 | Prochloraz |
| 189 | _CDS3298 | Carbendazim |
| 189 | _CDS3298 | Cyprodinil |
| 189 | _CDS3298 | Pyrimethanil |
| 189 | _CDS3298 | Fenpropimorph |
| 189 | _CDS3298 | Tridemorph |
| 189 | _CDS3298 | Iprodione |
| 189 | _CDS3298 | 5-ethyl-6-octyl-[1,2,4]triazolo[1, |
| | | 5-a]pyrimidine- |
| | | 7-ylamine |
| 189 | _CDS3298 | Mancozeb |
| 189 | _CDS3298 | Maneb |
| 189 | _CDS3298 | Metiram |
| 189 | _CDS3298 | Dithianon |
| 189 | _CDS3298 | Chlorothalonil |
| 189 | _CDS3298 | ThiophanateMethyl |
| 189 | _CDS3298 | Cymoxanil |
| 189 | _CDS3298 | Metrafenone |
| 189 | _CDS3298 | Acetochlor |
| 189 | _CDS3298 | Dimethenamid |
| 189 | _CDS3298 | Metolachlor |
| 189 | _CDS3298 | Metazachlor |
| 189 | _CDS3298 | Glyphosate |
| 189 | _CDS3298 | Glufosinate |
| 189 | _CDS3298 | Sulfosate |
| 189 | _CDS3298 | Fenoxaprop |
| 189 | _CDS3298 | Paraquat |
| 189 | _CDS3298 | Cycloxydim |
| 189 | _CDS3298 | Profoxydim |
| 189 | _CDS3298 | Sethoxydim |
| 189 | _CDS3298 | Tepraloxydim |
| 189 | _CDS3298 | Pendimethalin |
| 189 | _CDS3298 | Acifluorfen |
| 189 | _CDS3298 | Imazamethabenz |
| 189 | _CDS3298 | Imazamox |
| 189 | _CDS3298 | Imazapic |
| 189 | _CDS3298 | Imazapyr |
| 189 | _CDS3298 | Imazaquin |
| 189 | _CDS3298 | Imazethapyr |
| 189 | _CDS3298 | 2,4-D |
| 189 | _CDS3298 | Chloridazon |
| 189 | _CDS3298 | Picloram |
| 189 | _CDS3298 | Picolinafen |
| 189 | _CDS3298 | Cyclosulfamuron |
| 189 | _CDS3298 | Triflusulfuron |
| 189 | _CDS3298 | Atrazine |
| 189 | _CDS3298 | Pyroxasulfone |
| 189 | _CDS3298 | Bentazone |
| 189 | _CDS3298 | Cinidon-ethly |
| 189 | _CDS3298 | Cinmethylin |
| 189 | _CDS3298 | Dicamba |
| 189 | _CDS3298 | Diflufenzopyr |
| 189 | _CDS3298 | Quinclorac |
| 189 | _CDS3298 | Quinmerac |
| 189 | _CDS3298 | Mesotrione |
| 189 | _CDS3298 | Saflufenacil |
| 189 | _CDS3298 | Topramezone; |
| 190 | | acephate |
| 190 | | chlorpyrifos |
| 190 | | dimethoate |
| 190 | | methamidophos |
| 190 | | terbufos |
| 190 | | aldicarb |
| 190 | | carbofuran |
| 190 | | bifenthrin |
| 190 | | cypermethrin |
| 190 | | alpha-cypermethrin |
| 190 | | deltamethrin |
| 190 | | lambda-cyhalothrin |
| 190 | | tefluthrin |
| 190 | | flufenoxuron |
| 190 | | teflubenzuron |
| 190 | | spirotetramat; |
| 190 | | clothianidin |
| 190 | | imidacloprid |
| 190 | | thiamethoxam |
| 190 | | endosulfan |
| 190 | | fipronil |
| 190 | | abamectin |
| 190 | | spinosad |
| 190 | | spinetoram |
| 190 | | hydramethylnon; |
| 190 | | chlorfenapyr; |
| 190 | | indoxacarb |
| 190 | | metaflumizone |
| 190 | | flubendiamide |
| 190 | | chlorantraniliprole |
| 190 | | cyazypyr(HGW86) |
| 190 | | Azoxystrobin |
| 190 | | Dimoxystrobin |
| 190 | | Kresoxim-methyl |
| 190 | | Orysastrobin |
| 190 | | Pyraclostrobin |
| 190 | | Trifloxystrobin |
| 190 | | Bixafen |
| 190 | | Boscalid |
| 190 | | Isopyrazam |
| 190 | | Metalaxyl |
| 190 | | Penthiopyrad |
| 190 | | 3-Difluoromethyl-1- |
| | | methyl-1H-pyrazole- |
| | | 4-carboxylic |
| | | acid(2′,4′,5′-trifluoro- |
| | | biphenyl-2-yl)-amide |
| 190 | | Dimethomorph |
| 190 | | Difenoconazole |
| 190 | | Epoxiconazole |
| 190 | | Fluquinconazole |
| 190 | | Metconazol |
| 190 | | Propiconazole |
| 190 | | Prothioconazole |
| 190 | | Tebuconazole |
| 190 | | Triticonazole |
| 190 | | Prochloraz |
| 190 | | Carbendazim |
| 190 | | Cyprodinil |
| 190 | | Pyrimethanil |
| 190 | | Fenpropimorph |
| 190 | | Tridemorph |
| 190 | | Iprodione |
| 190 | | 5-ethyl-6-octyl-[1,2,4]triazolo[1, |
| | | 5-a]pyrimidine- |
| | | 7-ylamine |
| 190 | | Mancozeb |
| 190 | | Maneb |
| 190 | | Metiram |
| 190 | | Dithianon |
| 190 | | Chlorothalonil |
| 190 | | ThiophanateMethyl |
| 190 | | Cymoxanil |
| 190 | | Metrafenone |
| 190 | | Acetochlor |
| 190 | | Dimethenamid |
| 190 | | Metolachlor |
| 190 | | Metazachlor |
| 190 | | Glyphosate |
| 190 | | Glufosinate |
| 190 | | Sulfosate |
| 190 | | Fenoxaprop |
| 190 | | Paraquat |
| 190 | | Cycloxydim |
| 190 | | Profoxydim |
| 190 | | Sethoxydim |
| 190 | | Tepraloxydim |
| 190 | | Pendimethalin |
| 190 | | Acifluorfen |
| 190 | | Imazamethabenz |
| 190 | | Imazamox |
| 190 | | Imazapic |
| 190 | | Imazapyr |
| 190 | | Imazaquin |
| 190 | | Imazethapyr |
| 190 | | 2,4-D |
| 190 | | Chloridazon |
| 190 | | Picloram |
| 190 | | Picolinafen |
| 190 | | Cyclosulfamuron |
| 190 | | Triflusulfuron |
| 190 | | Atrazine |
| 190 | | Pyroxasulfone |
| 190 | | Bentazone |
| 190 | | Cinidon-ethly |
| 190 | | Cinmethylin |
| 190 | | Dicamba |
| 190 | | Diflufenzopyr |
| 190 | | Quinclorac |
| 190 | | Quinmerac |
| 190 | | Mesotrione |
| 190 | | Saflufenacil |
| 190 | | Topramezone; |
| 194 | YIL172C | acephate |
| 194 | YIL172C | chlorpyrifos |
| 194 | YIL172C | dimethoate |
| 194 | YIL172C | methamidophos |
| 194 | YIL172C | terbufos |
| 194 | YIL172C | aldicarb |
| 194 | YIL172C | carbofuran |
| 194 | YIL172C | bifenthrin |
| 194 | YIL172C | cypermethrin |
| 194 | YIL172C | alpha-cypermethrin |
| 194 | YIL172C | deltamethrin |
| 194 | YIL172C | lambda-cyhalothrin |
| 194 | YIL172C | tefluthrin |
| 194 | YIL172C | flufenoxuron |
| 194 | YIL172C | teflubenzuron |
| 194 | YIL172C | spirotetramat; |
| 194 | YIL172C | clothianidin |
| 194 | YIL172C | imidacloprid |
| 194 | YIL172C | thiamethoxam |
| 194 | YIL172C | endosulfan |
| 194 | YIL172C | fipronil |
| 194 | YIL172C | abamectin |
| 194 | YIL172C | spinosad |
| 194 | YIL172C | spinetoram |
| 194 | YIL172C | hydramethylnon; |
| 194 | YIL172C | chlorfenapyr; |
| 194 | YIL172C | indoxacarb |
| 194 | YIL172C | metaflumizone |
| 194 | YIL172C | flubendiamide |
| 194 | YIL172C | chlorantraniliprole |
| 194 | YIL172C | cyazypyr(HGW86) |
| 194 | YIL172C | Azoxystrobin |
| 194 | YIL172C | Dimoxystrobin |
| 194 | YIL172C | Kresoxim-methyl |
| 194 | YIL172C | Orysastrobin |
| 194 | YIL172C | Pyraclostrobin |
| 194 | YIL172C | Trifloxystrobin |
| 194 | YIL172C | Bixafen |
| 194 | YIL172C | Boscalid |
| 194 | YIL172C | Isopyrazam |
| 194 | YIL172C | Metalaxyl |
| 194 | YIL172C | Penthiopyrad |
| 194 | YIL172C | 3-Difluoromethyl-1- |
| | | methyl-1H-pyrazole- |
| | | 4-carboxylic |
| | | acid(2′,4′,5′-trifluoro- |
| | | biphenyl-2-yl)-amide |
| 194 | YIL172C | Dimethomorph |
| 194 | YIL172C | Difenoconazole |
| 194 | YIL172C | Epoxiconazole |
| 194 | YIL172C | Fluquinconazole |
| 194 | YIL172C | Metconazol |
| 194 | YIL172C | Propiconazole |
| 194 | YIL172C | Prothioconazole |
| 194 | YIL172C | Tebuconazole |
| 194 | YIL172C | Triticonazole |
| 194 | YIL172C | Prochloraz |
| 194 | YIL172C | Carbendazim |
| 194 | YIL172C | Cyprodinil |
| 194 | YIL172C | Pyrimethanil |
| 194 | YIL172C | Fenpropimorph |
| 194 | YIL172C | Tridemorph |
| 194 | YIL172C | Iprodione |
| 194 | YIL172C | 5-ethyl-6-octyl-[1,2,4]triazolo[1, |
| | | 5-a]pyrimidine- |
| | | 7-ylamine |
| 194 | YIL172C | Mancozeb |
| 194 | YIL172C | Maneb |
| 194 | YIL172C | Metiram |
| 194 | YIL172C | Dithianon |
| 194 | YIL172C | Chlorothalonil |
| 194 | YIL172C | ThiophanateMethyl |
| 194 | YIL172C | Cymoxanil |
| 194 | YIL172C | Metrafenone |
| 194 | YIL172C | Acetochlor |
| 194 | YIL172C | Dimethenamid |
| 194 | YIL172C | Metolachlor |
| 194 | YIL172C | Metazachlor |
| 194 | YIL172C | Glyphosate |
| 194 | YIL172C | Glufosinate |
| 194 | YIL172C | Sulfosate |
| 194 | YIL172C | Fenoxaprop |
| 194 | YIL172C | Paraquat |
| 194 | YIL172C | Cycloxydim |
| 194 | YIL172C | Profoxydim |
| 194 | YIL172C | Sethoxydim |
| 194 | YIL172C | Tepraloxydim |
| 194 | YIL172C | Pendimethalin |
| 194 | YIL172C | Acifluorfen |
| 194 | YIL172C | Imazamethabenz |
| 194 | YIL172C | Imazamox |
| 194 | YIL172C | Imazapic |
| 194 | YIL172C | Imazapyr |
| 194 | YIL172C | Imazaquin |
| 194 | YIL172C | Imazethapyr |
| 194 | YIL172C | 2,4-D |
| 194 | YIL172C | Chloridazon |
| 194 | YIL172C | Picloram |
| 194 | YIL172C | Picolinafen |
| 194 | YIL172C | Cyclosulfamuron |
| 194 | YIL172C | Triflusulfuron |
| 194 | YIL172C | Atrazine |
| 194 | YIL172C | Pyroxasulfone |
| 194 | YIL172C | Bentazone |
| 194 | YIL172C | Cinidon-ethly |
| 194 | YIL172C | Cinmethylin |
| 194 | YIL172C | Dicamba |
| 194 | YIL172C | Diflufenzopyr |
| 194 | YIL172C | Quinclorac |
| 194 | YIL172C | Quinmerac |
| 194 | YIL172C | Mesotrione |
| 194 | YIL172C | Saflufenacil |
| 194 | YIL172C | Topramezone; |
| 196 | YMR217W | acephate |
| 196 | YMR217W | chlorpyrifos |
| 196 | YMR217W | dimethoate |
| 196 | YMR217W | methamidophos |
| 196 | YMR217W | terbufos |
| 196 | YMR217W | aldicarb |
| 196 | YMR217W | carbofuran |
| 196 | YMR217W | bifenthrin |
| 196 | YMR217W | cypermethrin |
| 196 | YMR217W | alpha-cypermethrin |
| 196 | YMR217W | deltamethrin |
| 196 | YMR217W | lambda-cyhalothrin |
| 196 | YMR217W | tefluthrin |
| 196 | YMR217W | flufenoxuron |
| 196 | YMR217W | teflubenzuron |
| 196 | YMR217W | spirotetramat; |
| 196 | YMR217W | clothianidin |
| 196 | YMR217W | imidacloprid |
| 196 | YMR217W | thiamethoxam |
| 196 | YMR217W | endosulfan |
| 196 | YMR217W | fipronil |
| 196 | YMR217W | abamectin |
| 196 | YMR217W | spinosad |
| 196 | YMR217W | spinetoram |
| 196 | YMR217W | hydramethylnon; |
| 196 | YMR217W | chlorfenapyr; |
| 196 | YMR217W | indoxacarb |
| 196 | YMR217W | metaflumizone |
| 196 | YMR217W | flubendiamide |
| 196 | YMR217W | chlorantraniliprole |
| 196 | YMR217W | cyazypyr(HGW86) |
| 196 | YMR217W | Azoxystrobin |
| 196 | YMR217W | Dimoxystrobin |
| 196 | YMR217W | Kresoxim-methyl |
| 196 | YMR217W | Orysastrobin |
| 196 | YMR217W | Pyraclostrobin |
| 196 | YMR217W | Trifloxystrobin |
| 196 | YMR217W | Bixafen |
| 196 | YMR217W | Boscalid |
| 196 | YMR217W | Isopyrazam |
| 196 | YMR217W | Metalaxyl |
| 196 | YMR217W | Penthiopyrad |
| 196 | YMR217W | 3-Difluoromethyl-1- |
| | | methyl-1H-pyrazole- |
| | | 4-carboxylic |
| | | acid(2′,4′,5′-trifluoro- |
| | | biphenyl-2-yl)-amide |
| 196 | YMR217W | Dimethomorph |
| 196 | YMR217W | Difenoconazole |
| 196 | YMR217W | Epoxiconazole |
| 196 | YMR217W | Fluquinconazole |
| 196 | YMR217W | Metconazol |
| 196 | YMR217W | Propiconazole |
| 196 | YMR217W | Prothioconazole |
| 196 | YMR217W | Tebuconazole |
| 196 | YMR217W | Triticonazole |
| 196 | YMR217W | Prochloraz |
| 196 | YMR217W | Carbendazim |
| 196 | YMR217W | Cyprodinil |
| 196 | YMR217W | Pyrimethanil |
| 196 | YMR217W | Fenpropimorph |
| 196 | YMR217W | Tridemorph |
| 196 | YMR217W | Iprodione |
| 196 | YMR217W | 5-ethyl-6-octyl-[1,2,4]triazolo[1, |
| | | 5-a]pyrimidine- |
| | | 7-ylamine |
| 196 | YMR217W | Mancozeb |
| 196 | YMR217W | Maneb |
| 196 | YMR217W | Metiram |
| 196 | YMR217W | Dithianon |
| 196 | YMR217W | Chlorothalonil |
| 196 | YMR217W | ThiophanateMethyl |
| 196 | YMR217W | Cymoxanil |
| 196 | YMR217W | Metrafenone |
| 196 | YMR217W | Acetochlor |
| 196 | YMR217W | Dimethenamid |
| 196 | YMR217W | Metolachlor |
| 196 | YMR217W | Metazachlor |
| 196 | YMR217W | Glyphosate |
| 196 | YMR217W | Glufosinate |
| 196 | YMR217W | Sulfosate |
| 196 | YMR217W | Fenoxaprop |
| 196 | YMR217W | Paraquat |
| 196 | YMR217W | Cycloxydim |
| 196 | YMR217W | Profoxydim |
| 196 | YMR217W | Sethoxydim |
| 196 | YMR217W | Tepraloxydim |
| 196 | YMR217W | Pendimethalin |
| 196 | YMR217W | Acifluorfen |
| 196 | YMR217W | Imazamethabenz |
| 196 | YMR217W | Imazamox |
| 196 | YMR217W | Imazapic |
| 196 | YMR217W | Imazapyr |
| 196 | YMR217W | Imazaquin |
| 196 | YMR217W | Imazethapyr |
| 196 | YMR217W | 2,4-D |
| 196 | YMR217W | Chloridazon |
| 196 | YMR217W | Picloram |
| 196 | YMR217W | Picolinafen |
| 196 | YMR217W | Cyclosulfamuron |
| 196 | YMR217W | Triflusulfuron |
| 196 | YMR217W | Atrazine |
| 196 | YMR217W | Pyroxasulfone |
| 196 | YMR217W | Bentazone |
| 196 | YMR217W | Cinidon-ethly |
| 196 | YMR217W | Cinmethylin |
| 196 | YMR217W | Dicamba |
| 196 | YMR217W | Diflufenzopyr |
| 196 | YMR217W | Quinclorac |
| 196 | YMR217W | Quinmerac |
| 196 | YMR217W | Mesotrione |
| 196 | YMR217W | Saflufenacil |
| 196 | YMR217W | Topramezone; |
| 203 | GOICDS_CDS1608 | acephate |
| 203 | GOICDS_CDS1608 | chlorpyrifos |
| 203 | GOICDS_CDS1608 | dimethoate |
| 203 | GOICDS_CDS1608 | methamidophos |
| 203 | GOICDS_CDS1608 | terbufos |
| 203 | GOICDS_CDS1608 | aldicarb |
| 203 | GOICDS_CDS1608 | carbofuran |
| 203 | GOICDS_CDS1608 | bifenthrin |
| 203 | GOICDS_CDS1608 | cypermethrin |
| 203 | GOICDS_CDS1608 | alpha-cypermethrin |
| 203 | GOICDS_CDS1608 | deltamethrin |
| 203 | GOICDS_CDS1608 | lambda-cyhalothrin |
| 203 | GOICDS_CDS1608 | tefluthrin |
| 203 | GOICDS_CDS1608 | flufenoxuron |
| 203 | GOICDS_CDS1608 | teflubenzuron |
| 203 | GOICDS_CDS1608 | spirotetramat; |
| 203 | GOICDS_CDS1608 | clothianidin |
| 203 | GOICDS_CDS1608 | imidacloprid |
| 203 | GOICDS_CDS1608 | thiamethoxam |
| 203 | GOICDS_CDS1608 | endosulfan |
| 203 | GOICDS_CDS1608 | fipronil |
| 203 | GOICDS_CDS1608 | abamectin |
| 203 | GOICDS_CDS1608 | spinosad |
| 203 | GOICDS_CDS1608 | spinetoram |
| 203 | GOICDS_CDS1608 | hydramethylnon; |
| 203 | GOICDS_CDS1608 | chlorfenapyr; |
| 203 | GOICDS_CDS1608 | indoxacarb |
| 203 | GOICDS_CDS1608 | metaflumizone |
| 203 | GOICDS_CDS1608 | flubendiamide |
| 203 | GOICDS_CDS1608 | chlorantraniliprole |
| 203 | GOICDS_CDS1608 | cyazypyr(HGW86) |
| 203 | GOICDS_CDS1608 | Azoxystrobin |
| 203 | GOICDS_CDS1608 | Dimoxystrobin |
| 203 | GOICDS_CDS1608 | Kresoxim-methyl |
| 203 | GOICDS_CDS1608 | Orysastrobin |
| 203 | GOICDS_CDS1608 | Pyraclostrobin |
| 203 | GOICDS_CDS1608 | Trifloxystrobin |
| 203 | GOICDS_CDS1608 | Bixafen |
| 203 | GOICDS_CDS1608 | Boscalid |
| 203 | GOICDS_CDS1608 | Isopyrazam |
| 203 | GOICDS_CDS1608 | Metalaxyl |
| 203 | GOICDS_CDS1608 | Penthiopyrad |
| 203 | GOICDS_CDS1608 | 3-Difluoromethyl-1- |
| | | methyl-1H-pyrazole- |
| | | 4-carboxylic acid(2′, |
| | | 4′,5′-trifluoro- |
| | | biphenyl-2-yl)-amide |
| 203 | GOICDS_CDS1608 | Dimethomorph |
| 203 | GOICDS_CDS1608 | Difenoconazole |
| 203 | GOICDS_CDS1608 | Epoxiconazole |
| 203 | GOICDS_CDS1608 | Fluquinconazole |
| 203 | GOICDS_CDS1608 | Metconazol |
| 203 | GOICDS_CDS1608 | Propiconazole |
| 203 | GOICDS_CDS1608 | Prothioconazole |
| 203 | GOICDS_CDS1608 | Tebuconazole |
| 203 | GOICDS_CDS1608 | Triticonazole |
| 203 | GOICDS_CDS1608 | Prochloraz |
| 203 | GOICDS_CDS1608 | Carbendazim |
| 203 | GOICDS_CDS1608 | Cyprodinil |
| 203 | GOICDS_CDS1608 | Pyrimethanil |
| 203 | GOICDS_CDS1608 | Fenpropimorph |
| 203 | GOICDS_CDS1608 | Tridemorph |
| 203 | GOICDS_CDS1608 | Iprodione |
| 203 | GOICDS_CDS1608 | 5-ethyl-6-octyl-[1,2,4]triazolo[1, |
| | | 5-a]pyrimidine- |
| | | 7-ylamine |
| 203 | GOICDS_CDS1608 | Mancozeb |
| 203 | GOICDS_CDS1608 | Maneb |
| 203 | GOICDS_CDS1608 | Metiram |
| 203 | GOICDS_CDS1608 | Dithianon |
| 203 | GOICDS_CDS1608 | Chlorothalonil |
| 203 | GOICDS_CDS1608 | ThiophanateMethyl |
| 203 | GOICDS_CDS1608 | Cymoxanil |
| 203 | GOICDS_CDS1608 | Metrafenone |
| 203 | GOICDS_CDS1608 | Acetochlor |
| 203 | GOICDS_CDS1608 | Dimethenamid |
| 203 | GOICDS_CDS1608 | Metolachlor |
| 203 | GOICDS_CDS1608 | Metazachlor |
| 203 | GOICDS_CDS1608 | Glyphosate |
| 203 | GOICDS_CDS1608 | Glufosinate |
| 203 | GOICDS_CDS1608 | Sulfosate |
| 203 | GOICDS_CDS1608 | Fenoxaprop |
| 203 | GOICDS_CDS1608 | Paraquat |
| 203 | GOICDS_CDS1608 | Cycloxydim |
| 203 | GOICDS_CDS1608 | Profoxydim |
| 203 | GOICDS_CDS1608 | Sethoxydim |
| 203 | GOICDS_CDS1608 | Tepraloxydim |
| 203 | GOICDS_CDS1608 | Pendimethalin |
| 203 | GOICDS_CDS1608 | Acifluorfen |
| 203 | GOICDS_CDS1608 | Imazamethabenz |
| 203 | GOICDS_CDS1608 | Imazamox |
| 203 | GOICDS_CDS1608 | Imazapic |
| 203 | GOICDS_CDS1608 | Imazapyr |
| 203 | GOICDS_CDS1608 | Imazaquin |
| 203 | GOICDS_CDS1608 | Imazethapyr |
| 203 | GOICDS_CDS1608 | 2,4-D |
| 203 | GOICDS_CDS1608 | Chloridazon |
| 203 | GOICDS_CDS1608 | Picloram |
| 203 | GOICDS_CDS1608 | Picolinafen |
| 203 | GOICDS_CDS1608 | Cyclosulfamuron |
| 203 | GOICDS_CDS1608 | Triflusulfuron |
| 203 | GOICDS_CDS1608 | Atrazine |
| 203 | GOICDS_CDS1608 | Pyroxasulfone |
| 203 | GOICDS_CDS1608 | Bentazone |
| 203 | GOICDS_CDS1608 | Cinidon-ethly |
| 203 | GOICDS_CDS1608 | Cinmethylin |
| 203 | GOICDS_CDS1608 | Dicamba |
| 203 | GOICDS_CDS1608 | Diflufenzopyr |
| 203 | GOICDS_CDS1608 | Quinclorac |
| 203 | GOICDS_CDS1608 | Quinmerac |
| 203 | GOICDS_CDS1608 | Mesotrione |
| 203 | GOICDS_CDS1608 | Saflufenacil |
| 203 | GOICDS_CDS1608 | Topramezone; |
| 204 | | acephate |
| 204 | | chlorpyrifos |
| 204 | | dimethoate |
| 204 | | methamidophos |
| 204 | | terbufos |
| 204 | | aldicarb |
| 204 | | carbofuran |
| 204 | | bifenthrin |
| 204 | | cypermethrin |
| 204 | | alpha-cypermethrin |
| 204 | | deltamethrin |
| 204 | | lambda-cyhalothrin |
| 204 | | tefluthrin |
| 204 | | flufenoxuron |
| 204 | | teflubenzuron |
| 204 | | spirotetramat; |
| 204 | | clothianidin |
| 204 | | imidacloprid |
| 204 | | thiamethoxam |
| 204 | | endosulfan |
| 204 | | fipronil |
| 204 | | abamectin |
| 204 | | spinosad |
| 204 | | spinetoram |
| 204 | | hydramethylnon; |
| 204 | | chlorfenapyr; |
| 204 | | indoxacarb |
| 204 | | metaflumizone |
| 204 | | flubendiamide |
| 204 | | chlorantraniliprole |
| 204 | | cyazypyr(HGW86) |
| 204 | | Azoxystrobin |
| 204 | | Dimoxystrobin |
| 204 | | Kresoxim-methyl |
| 204 | | Orysastrobin |
| 204 | | Pyraclostrobin |
| 204 | | Trifloxystrobin |
| 204 | | Bixafen |
| 204 | | Boscalid |
| 204 | | Isopyrazam |
| 204 | | Metalaxyl |
| 204 | | Penthiopyrad |
| 204 | | 3-Difluoromethyl-1- |
| | | methyl-1H-pyrazole- |
| | | 4-carboxylic |
| | | acid(2′,4′,5′-trifluoro- |
| | | biphenyl-2-yl)-amide |
| 204 | | Dimethomorph |
| 204 | | Difenoconazole |
| 204 | | Epoxiconazole |
| 204 | | Fluquinconazole |
| 204 | | Metconazol |
| 204 | | Propiconazole |
| 204 | | Prothioconazole |
| 204 | | Tebuconazole |
| 204 | | Triticonazole |
| 204 | | Prochloraz |
| 204 | | Carbendazim |
| 204 | | Cyprodinil |
| 204 | | Pyrimethanil |
| 204 | | Fenpropimorph |
| 204 | | Tridemorph |
| 204 | | Iprodione |
| 204 | | 5-ethyl-6-octyl-[1,2,4]triazolo[1, |
| | | 5-a]pyrimidine- |
| | | 7-ylamine |
| 204 | | Mancozeb |
| 204 | | Maneb |
| 204 | | Metiram |
| 204 | | Dithianon |
| 204 | | Chlorothalonil |
| 204 | | ThiophanateMethyl |
| 204 | | Cymoxanil |
| 204 | | Metrafenone |
| 204 | | Acetochlor |
| 204 | | Dimethenamid |
| 204 | | Metolachlor |
| 204 | | Metazachlor |
| 204 | | Glyphosate |
| 204 | | Glufosinate |
| 204 | | Sulfosate |
| 204 | | Fenoxaprop |
| 204 | | Paraquat |
| 204 | | Cycloxydim |
| 204 | | Profoxydim |
| 204 | | Sethoxydim |
| 204 | | Tepraloxydim |
| 204 | | Pendimethalin |
| 204 | | Acifluorfen |
| 204 | | Imazamethabenz |
| 204 | | Imazamox |
| 204 | | Imazapic |
| 204 | | Imazapyr |
| 204 | | Imazaquin |
| 204 | | Imazethapyr |
| 204 | | 2,4-D |
| 204 | | Chloridazon |
| 204 | | Picloram |
| 204 | | Picolinafen |
| 204 | | Cyclosulfamuron |
| 204 | | Triflusulfuron |
| 204 | | Atrazine |
| 204 | | Pyroxasulfone |
| 204 | | Bentazone |
| 204 | | Cinidon-ethly |
| 204 | | Cinmethylin |
| 204 | | Dicamba |
| 204 | | Diflufenzopyr |
| 204 | | Quinclorac |
| 204 | | Quinmerac |
| 204 | | Mesotrione |
| 204 | | Saflufenacil |
| 204 | | Topramezone; |
| 205 | GOICDS_CDS0644_7 | acephate |
| 205 | GOICDS_CDS0644_7 | chlorpyrifos |
| 205 | GOICDS_CDS0644_7 | dimethoate |
| 205 | GOICDS_CDS0644_7 | methamidophos |
| 205 | GOICDS_CDS0644_7 | terbufos |
| 205 | GOICDS_CDS0644_7 | aldicarb |
| 205 | GOICDS_CDS0644_7 | carbofuran |
| 205 | GOICDS_CDS0644_7 | bifenthrin |
| 205 | GOICDS_CDS0644_7 | cypermethrin |
| 205 | GOICDS_CDS0644_7 | alpha-cypermethrin |
| 205 | GOICDS_CDS0644_7 | deltamethrin |
| 205 | GOICDS_CDS0644_7 | lambda-cyhalothrin |
| 205 | GOICDS_CDS0644_7 | tefluthrin |
| 205 | GOICDS_CDS0644_7 | flufenoxuron |
| 205 | GOICDS_CDS0644_7 | teflubenzuron |
| 205 | GOICDS_CDS0644_7 | spirotetramat; |
| 205 | GOICDS_CDS0644_7 | clothianidin |
| 205 | GOICDS_CDS0644_7 | imidacloprid |
| 205 | GOICDS_CDS0644_7 | thiamethoxam |
| 205 | GOICDS_CDS0644_7 | endosulfan |
| 205 | GOICDS_CDS0644_7 | fipronil |
| 205 | GOICDS_CDS0644_7 | abamectin |
| 205 | GOICDS_CDS0644_7 | spinosad |
| 205 | GOICDS_CDS0644_7 | spinetoram |
| 205 | GOICDS_CDS0644_7 | hydramethylnon; |
| 205 | GOICDS_CDS0644_7 | chlorfenapyr; |
| 205 | GOICDS_CDS0644_7 | indoxacarb |
| 205 | GOICDS_CDS0644_7 | metaflumizone |
| 205 | GOICDS_CDS0644_7 | flubendiamide |
| 205 | GOICDS_CDS0644_7 | chlorantraniliprole |
| 205 | GOICDS_CDS0644_7 | cyazypyr(HGW86) |
| 205 | GOICDS_CDS0644_7 | Azoxystrobin |
| 205 | GOICDS_CDS0644_7 | Dimoxystrobin |
| 205 | GOICDS_CDS0644_7 | Kresoxim-methyl |
| 205 | GOICDS_CDS0644_7 | Orysastrobin |
| 205 | GOICDS_CDS0644_7 | Pyraclostrobin |
| 205 | GOICDS_CDS0644_7 | Trifloxystrobin |
| 205 | GOICDS_CDS0644_7 | Bixafen |
| 205 | GOICDS_CDS0644_7 | Boscalid |
| 205 | GOICDS_CDS0644_7 | Isopyrazam |
| 205 | GOICDS_CDS0644_7 | Metalaxyl |
| 205 | GOICDS_CDS0644_7 | Penthiopyrad |
| 205 | GOICDS_CDS0644_7 | 3-Difluoromethyl-1- |
| | | methyl-1H-pyrazole- |
| | | 4-carboxylic acid(2′, |
| | | 4′,5′-trifluoro- |
| | | biphenyl-2-yl)-amide |
| 205 | GOICDS_CDS0644_7 | Dimethomorph |
| 205 | GOICDS_CDS0644_7 | Difenoconazole |
| 205 | GOICDS_CDS0644_7 | Epoxiconazole |
| 205 | GOICDS_CDS0644_7 | Fluquinconazole |
| 205 | GOICDS_CDS0644_7 | Metconazol |
| 205 | GOICDS_CDS0644_7 | Propiconazole |
| 205 | GOICDS_CDS0644_7 | Prothioconazole |
| 205 | GOICDS_CDS0644_7 | Tebuconazole |
| 205 | GOICDS_CDS0644_7 | Triticonazole |
| 205 | GOICDS_CDS0644_7 | Prochloraz |
| 205 | GOICDS_CDS0644_7 | Carbendazim |
| 205 | GOICDS_CDS0644_7 | Cyprodinil |
| 205 | GOICDS_CDS0644_7 | Pyrimethanil |
| 205 | GOICDS_CDS0644_7 | Fenpropimorph |
| 205 | GOICDS_CDS0644_7 | Tridemorph |
| 205 | GOICDS_CDS0644_7 | Iprodione |
| 205 | GOICDS_CDS0644_7 | 5-ethyl-6-octyl-[1,2,4]triazolo[1, |
| | | 5-a]pyrimidine- |
| | | 7-ylamine |
| 205 | GOICDS_CDS0644_7 | Mancozeb |
| 205 | GOICDS_CDS0644_7 | Maneb |
| 205 | GOICDS_CDS0644_7 | Metiram |
| 205 | GOICDS_CDS0644_7 | Dithianon |
| 205 | GOICDS_CDS0644_7 | Chlorothalonil |
| 205 | GOICDS_CDS0644_7 | ThiophanateMethyl |
| 205 | GOICDS_CDS0644_7 | Cymoxanil |
| 205 | GOICDS_CDS0644_7 | Metrafenone |
| 205 | GOICDS_CDS0644_7 | Acetochlor |
| 205 | GOICDS_CDS0644_7 | Dimethenamid |
| 205 | GOICDS_CDS0644_7 | Metolachlor |
| 205 | GOICDS_CDS0644_7 | Metazachlor |
| 205 | GOICDS_CDS0644_7 | Glyphosate |
| 205 | GOICDS_CDS0644_7 | Glufosinate |
| 205 | GOICDS_CDS0644_7 | Sulfosate |
| 205 | GOICDS_CDS0644_7 | Fenoxaprop |
| 205 | GOICDS_CDS0644_7 | Paraquat |
| 205 | GOICDS_CDS0644_7 | Cycloxydim |
| 205 | GOICDS_CDS0644_7 | Profoxydim |
| 205 | GOICDS_CDS0644_7 | Sethoxydim |
| 205 | GOICDS_CDS0644_7 | Tepraloxydim |
| 205 | GOICDS_CDS0644_7 | Pendimethalin |
| 205 | GOICDS_CDS0644_7 | Acifluorfen |
| 205 | GOICDS_CDS0644_7 | Imazamethabenz |
| 205 | GOICDS_CDS0644_7 | Imazamox |
| 205 | GOICDS_CDS0644_7 | Imazapic |
| 205 | GOICDS_CDS0644_7 | Imazapyr |
| 205 | GOICDS_CDS0644_7 | Imazaquin |
| 205 | GOICDS_CDS0644_7 | Imazethapyr |
| 205 | GOICDS_CDS0644_7 | 2,4-D |
| 205 | GOICDS_CDS0644_7 | Chloridazon |
| 205 | GOICDS_CDS0644_7 | Picloram |
| 205 | GOICDS_CDS0644_7 | Picolinafen |
| 205 | GOICDS_CDS0644_7 | Cyclosulfamuron |
| 205 | GOICDS_CDS0644_7 | Triflusulfuron |
| 205 | GOICDS_CDS0644_7 | Atrazine |
| 205 | GOICDS_CDS0644_7 | Pyroxasulfone |
| 205 | GOICDS_CDS0644_7 | Bentazone |
| 205 | GOICDS_CDS0644_7 | Cinidon-ethly |
| 205 | GOICDS_CDS0644_7 | Cinmethylin |
| 205 | GOICDS_CDS0644_7 | Dicamba |
| 205 | GOICDS_CDS0644_7 | Diflufenzopyr |
| 205 | GOICDS_CDS0644_7 | Quinclorac |
| 205 | GOICDS_CDS0644_7 | Quinmerac |
| 205 | GOICDS_CDS0644_7 | Mesotrione |
| 205 | GOICDS_CDS0644_7 | Saflufenacil |
| 205 | GOICDS_CDS0644_7 | Topramezone; |
| 206 | | acephate |
| 206 | | chlorpyrifos |
| 206 | | dimethoate |
| 206 | | methamidophos |
| 206 | | terbufos |
| 206 | | aldicarb |
| 206 | | carbofuran |
| 206 | | bifenthrin |
| 206 | | cypermethrin |
| 206 | | alpha-cypermethrin |
| 206 | | deltamethrin |
| 206 | | lambda-cyhalothrin |
| 206 | | tefluthrin |
| 206 | | flufenoxuron |
| 206 | | teflubenzuron |
| 206 | | spirotetramat; |
| 206 | | clothianidin |
| 206 | | imidacloprid |
| 206 | | thiamethoxam |
| 206 | | endosulfan |
| 206 | | fipronil |
| 206 | | abamectin |
| 206 | | spinosad |
| 206 | | spinetoram |
| 206 | | hydramethylnon; |
| 206 | | chlorfenapyr; |
| 206 | | indoxacarb |
| 206 | | metaflumizone |
| 206 | | flubendiamide |
| 206 | | chlorantraniliprole |
| 206 | | cyazypyr(HGW86) |
| 206 | | Azoxystrobin |
| 206 | | Dimoxystrobin |
| 206 | | Kresoxim-methyl |
| 206 | | Orysastrobin |
| 206 | | Pyraclostrobin |
| 206 | | Trifloxystrobin |
| 206 | | Bixafen |
| 206 | | Boscalid |
| 206 | | Isopyrazam |
| 206 | | Metalaxyl |
| 206 | | Penthiopyrad |
| 206 | | 3-Difluoromethyl-1- |
| | | methyl-1H-pyrazole- |
| | | 4-carboxylic |
| | | acid(2′,4′,5′-trifluoro- |
| | | biphenyl-2-yl)-amide |
| 206 | | Dimethomorph |
| 206 | | Difenoconazole |
| 206 | | Epoxiconazole |
| 206 | | Fluquinconazole |
| 206 | | Metconazol |
| 206 | | Propiconazole |
| 206 | | Prothioconazole |
| 206 | | Tebuconazole |
| 206 | | Triticonazole |
| 206 | | Prochloraz |
| 206 | | Carbendazim |
| 206 | | Cyprodinil |
| 206 | | Pyrimethanil |
| 206 | | Fenpropimorph |
| 206 | | Tridemorph |
| 206 | | Iprodione |
| 206 | | 5-ethyl-6-octyl-[1,2,4]triazolo[1, |
| | | 5-a]pyrimidine- |
| | | 7-ylamine |
| 206 | | Mancozeb |
| 206 | | Maneb |
| 206 | | Metiram |
| 206 | | Dithianon |
| 206 | | Chlorothalonil |
| 206 | | ThiophanateMethyl |
| 206 | | Cymoxanil |
| 206 | | Metrafenone |
| 206 | | Acetochlor |
| 206 | | Dimethenamid |
| 206 | | Metolachlor |
| 206 | | Metazachlor |
| 206 | | Glyphosate |
| 206 | | Glufosinate |
| 206 | | Sulfosate |
| 206 | | Fenoxaprop |
| 206 | | Paraquat |
| 206 | | Cycloxydim |
| 206 | | Profoxydim |
| 206 | | Sethoxydim |
| 206 | | Tepraloxydim |
| 206 | | Pendimethalin |
| 206 | | Acifluorfen |
| 206 | | Imazamethabenz |
| 206 | | Imazamox |
| 206 | | Imazapic |
| 206 | | Imazapyr |
| 206 | | Imazaquin |
| 206 | | Imazethapyr |
| 206 | | 2,4-D |
| 206 | | Chloridazon |
| 206 | | Picloram |
| 206 | | Picolinafen |
| 206 | | Cyclosulfamuron |
| 206 | | Triflusulfuron |
| 206 | | Atrazine |
| 206 | | Pyroxasulfone |
| 206 | | Bentazone |
| 206 | | Cinidon-ethly |
| 206 | | Cinmethylin |
| 206 | | Dicamba |
| 206 | | Diflufenzopyr |
| 206 | | Quinclorac |
| 206 | | Quinmerac |
| 206 | | Mesotrione |
| 206 | | Saflufenacil |
| 206 | | Topramezone; |
| 207 | GOICDS_CDS2447 | acephate |
| 207 | GOICDS_CDS2447 | chlorpyrifos |
| 207 | GOICDS_CDS2447 | dimethoate |
| 207 | GOICDS_CDS2447 | methamidophos |
| 207 | GOICDS_CDS2447 | terbufos |
| 207 | GOICDS_CDS2447 | aldicarb |
| 207 | GOICDS_CDS2447 | carbofuran |
| 207 | GOICDS_CDS2447 | bifenthrin |
| 207 | GOICDS_CDS2447 | cypermethrin |
| 207 | GOICDS_CDS2447 | alpha-cypermethrin |
| 207 | GOICDS_CDS2447 | deltamethrin |
| 207 | GOICDS_CDS2447 | lambda-cyhalothrin |
| 207 | GOICDS_CDS2447 | tefluthrin |
| 207 | GOICDS_CDS2447 | flufenoxuron |
| 207 | GOICDS_CDS2447 | teflubenzuron |
| 207 | GOICDS_CDS2447 | spirotetramat; |
| 207 | GOICDS_CDS2447 | clothianidin |
| 207 | GOICDS_CDS2447 | imidacloprid |
| 207 | GOICDS_CDS2447 | thiamethoxam |
| 207 | GOICDS_CDS2447 | endosulfan |
| 207 | GOICDS_CDS2447 | fipronil |
| 207 | GOICDS_CDS2447 | abamectin |
| 207 | GOICDS_CDS2447 | spinosad |
| 207 | GOICDS_CDS2447 | spinetoram |
| 207 | GOICDS_CDS2447 | hydramethylnon; |
| 207 | GOICDS_CDS2447 | chlorfenapyr; |
| 207 | GOICDS_CDS2447 | indoxacarb |
| 207 | GOICDS_CDS2447 | metaflumizone |
| 207 | GOICDS_CDS2447 | flubendiamide |
| 207 | GOICDS_CDS2447 | chlorantraniliprole |
| 207 | GOICDS_CDS2447 | cyazypyr(HGW86) |
| 207 | GOICDS_CDS2447 | Azoxystrobin |
| 207 | GOICDS_CDS2447 | Dimoxystrobin |
| 207 | GOICDS_CDS2447 | Kresoxim-methyl |
| 207 | GOICDS_CDS2447 | Orysastrobin |
| 207 | GOICDS_CDS2447 | Pyraclostrobin |
| 207 | GOICDS_CDS2447 | Trifloxystrobin |
| 207 | GOICDS_CDS2447 | Bixafen |
| 207 | GOICDS_CDS2447 | Boscalid |
| 207 | GOICDS_CDS2447 | Isopyrazam |
| 207 | GOICDS_CDS2447 | Metalaxyl |
| 207 | GOICDS_CDS2447 | Penthiopyrad |
| 207 | GOICDS_CDS2447 | 3-Difluoromethyl-1- |
| | | methyl-1H-pyrazole- |
| | | 4-carboxylic acid(2′, |
| | | 4′,5′-trifluoro- |
| | | biphenyl-2-yl)-amide |
| 207 | GOICDS_CDS2447 | Dimethomorph |
| 207 | GOICDS_CDS2447 | Difenoconazole |
| 207 | GOICDS_CDS2447 | Epoxiconazole |
| 207 | GOICDS_CDS2447 | Fluquinconazole |
| 207 | GOICDS_CDS2447 | Metconazol |
| 207 | GOICDS_CDS2447 | Propiconazole |
| 207 | GOICDS_CDS2447 | Prothioconazole |
| 207 | GOICDS_CDS2447 | Tebuconazole |
| 207 | GOICDS_CDS2447 | Triticonazole |
| 207 | GOICDS_CDS2447 | Prochloraz |
| 207 | GOICDS_CDS2447 | Carbendazim |
| 207 | GOICDS_CDS2447 | Cyprodinil |
| 207 | GOICDS_CDS2447 | Pyrimethanil |
| 207 | GOICDS_CDS2447 | Fenpropimorph |
| 207 | GOICDS_CDS2447 | Tridemorph |
| 207 | GOICDS_CDS2447 | Iprodione |
| 207 | GOICDS_CDS2447 | 5-ethyl-6-octyl-[1,2,4]triazolo[1, |
| | | 5-a]pyrimidine- |
| | | 7-ylamine |
| 207 | GOICDS_CDS2447 | Mancozeb |
| 207 | GOICDS_CDS2447 | Maneb |
| 207 | GOICDS_CDS2447 | Metiram |
| 207 | GOICDS_CDS2447 | Dithianon |
| 207 | GOICDS_CDS2447 | Chlorothalonil |
| 207 | GOICDS_CDS2447 | ThiophanateMethyl |
| 207 | GOICDS_CDS2447 | Cymoxanil |
| 207 | GOICDS_CDS2447 | Metrafenone |
| 207 | GOICDS_CDS2447 | Acetochlor |
| 207 | GOICDS_CDS2447 | Dimethenamid |
| 207 | GOICDS_CDS2447 | Metolachlor |
| 207 | GOICDS_CDS2447 | Metazachlor |
| 207 | GOICDS_CDS2447 | Glyphosate |
| 207 | GOICDS_CDS2447 | Glufosinate |
| 207 | GOICDS_CDS2447 | Sulfosate |
| 207 | GOICDS_CDS2447 | Fenoxaprop |
| 207 | GOICDS_CDS2447 | Paraquat |
| 207 | GOICDS_CDS2447 | Cycloxydim |
| 207 | GOICDS_CDS2447 | Profoxydim |
| 207 | GOICDS_CDS2447 | Sethoxydim |
| 207 | GOICDS_CDS2447 | Tepraloxydim |
| 207 | GOICDS_CDS2447 | Pendimethalin |
| 207 | GOICDS_CDS2447 | Acifluorfen |
| 207 | GOICDS_CDS2447 | Imazamethabenz |
| 207 | GOICDS_CDS2447 | Imazamox |
| 207 | GOICDS_CDS2447 | Imazapic |
| 207 | GOICDS_CDS2447 | Imazapyr |
| 207 | GOICDS_CDS2447 | Imazaquin |
| 207 | GOICDS_CDS2447 | Imazethapyr |
| 207 | GOICDS_CDS2447 | 2,4-D |
| 207 | GOICDS_CDS2447 | Chloridazon |
| 207 | GOICDS_CDS2447 | Picloram |
| 207 | GOICDS_CDS2447 | Picolinafen |
| 207 | GOICDS_CDS2447 | Cyclosulfamuron |
| 207 | GOICDS_CDS2447 | Triflusulfuron |
| 207 | GOICDS_CDS2447 | Atrazine |
| 207 | GOICDS_CDS2447 | Pyroxasulfone |
| 207 | GOICDS_CDS2447 | Bentazone |
| 207 | GOICDS_CDS2447 | Cinidon-ethly |
| 207 | GOICDS_CDS2447 | Cinmethylin |
| 207 | GOICDS_CDS2447 | Dicamba |
| 207 | GOICDS_CDS2447 | Diflufenzopyr |
| 207 | GOICDS_CDS2447 | Quinclorac |
| 207 | GOICDS_CDS2447 | Quinmerac |
| 207 | GOICDS_CDS2447 | Mesotrione |
| 207 | GOICDS_CDS2447 | Saflufenacil |
| 207 | GOICDS_CDS2447 | Topramezone; |
| 209 | GOISCDS_CDS3159 | acephate |
| 209 | GOISCDS_CDS3159 | chlorpyrifos |
| 209 | GOISCDS_CDS3159 | dimethoate |
| 209 | GOISCDS_CDS3159 | methamidophos |
| 209 | GOISCDS_CDS3159 | terbufos |
| 209 | GOISCDS_CDS3159 | aldicarb |
| 209 | GOISCDS_CDS3159 | carbofuran |
| 209 | GOISCDS_CDS3159 | bifenthrin |
| 209 | GOISCDS_CDS3159 | cypermethrin |
| 209 | GOISCDS_CDS3159 | alpha-cypermethrin |
| 209 | GOISCDS_CDS3159 | deltamethrin |
| 209 | GOISCDS_CDS3159 | lambda-cyhalothrin |
| 209 | GOISCDS_CDS3159 | tefluthrin |
| 209 | GOISCDS_CDS3159 | flufenoxuron |
| 209 | GOISCDS_CDS3159 | teflubenzuron |
| 209 | GOISCDS_CDS3159 | spirotetramat; |
| 209 | GOISCDS_CDS3159 | clothianidin |
| 209 | GOISCDS_CDS3159 | imidacloprid |
| 209 | GOISCDS_CDS3159 | thiamethoxam |
| 209 | GOISCDS_CDS3159 | endosulfan |
| 209 | GOISCDS_CDS3159 | fipronil |
| 209 | GOISCDS_CDS3159 | abamectin |
| 209 | GOISCDS_CDS3159 | spinosad |
| 209 | GOISCDS_CDS3159 | spinetoram |
| 209 | GOISCDS_CDS3159 | hydramethylnon; |
| 209 | GOISCDS_CDS3159 | chlorfenapyr; |
| 209 | GOISCDS_CDS3159 | indoxacarb |
| 209 | GOISCDS_CDS3159 | metaflumizone |
| 209 | GOISCDS_CDS3159 | flubendiamide |
| 209 | GOISCDS_CDS3159 | chlorantraniliprole |
| 209 | GOISCDS_CDS3159 | cyazypyr(HGW86) |
| 209 | GOISCDS_CDS3159 | Azoxystrobin |
| 209 | GOISCDS_CDS3159 | Dimoxystrobin |
| 209 | GOISCDS_CDS3159 | Kresoxim-methyl |
| 209 | GOISCDS_CDS3159 | Orysastrobin |
| 209 | GOISCDS_CDS3159 | Pyraclostrobin |
| 209 | GOISCDS_CDS3159 | Trifloxystrobin |
| 209 | GOISCDS_CDS3159 | Bixafen |
| 209 | GOISCDS_CDS3159 | Boscalid |
| 209 | GOISCDS_CDS3159 | Isopyrazam |
| 209 | GOISCDS_CDS3159 | Metalaxyl |
| 209 | GOISCDS_CDS3159 | Penthiopyrad |
| 209 | GOISCDS_CDS3159 | 3-Difluoromethyl-1- |
| | | methyl-1H-pyrazole- |
| | | 4-carboxylic |
| | | acid(2′,4′,5′-trifluoro- |
| | | biphenyl-2-yl)-amide |
| 209 | GOISCDS_CDS3159 | Dimethomorph |
| 209 | GOISCDS_CDS3159 | Difenoconazole |
| 209 | GOISCDS_CDS3159 | Epoxiconazole |
| 209 | GOISCDS_CDS3159 | Fluquinconazole |
| 209 | GOISCDS_CDS3159 | Metconazol |
| 209 | GOISCDS_CDS3159 | Propiconazole |
| 209 | GOISCDS_CDS3159 | Prothioconazole |
| 209 | GOISCDS_CDS3159 | Tebuconazole |
| 209 | GOISCDS_CDS3159 | Triticonazole |
| 209 | GOISCDS_CDS3159 | Prochloraz |
| 209 | GOISCDS_CDS3159 | Carbendazim |
| 209 | GOISCDS_CDS3159 | Cyprodinil |
| 209 | GOISCDS_CDS3159 | Pyrimethanil |
| 209 | GOISCDS_CDS3159 | Fenpropimorph |
| 209 | GOISCDS_CDS3159 | Tridemorph |
| 209 | GOISCDS_CDS3159 | Iprodione |
| 209 | GOISCDS_CDS3159 | 5-ethyl-6-octyl-[1,2,4]triazolo[1, |
| | | 5-a]pyrimidine- |
| | | 7-ylamine |
| 209 | GOISCDS_CDS3159 | Mancozeb |
| 209 | GOISCDS_CDS3159 | Maneb |
| 209 | GOISCDS_CDS3159 | Metiram |
| 209 | GOISCDS_CDS3159 | Dithianon |
| 209 | GOISCDS_CDS3159 | Chlorothalonil |
| 209 | GOISCDS_CDS3159 | ThiophanateMethyl |
| 209 | GOISCDS_CDS3159 | Cymoxanil |
| 209 | GOISCDS_CDS3159 | Metrafenone |
| 209 | GOISCDS_CDS3159 | Acetochlor |
| 209 | GOISCDS_CDS3159 | Dimethenamid |
| 209 | GOISCDS_CDS3159 | Metolachlor |
| 209 | GOISCDS_CDS3159 | Metazachlor |
| 209 | GOISCDS_CDS3159 | Glyphosate |
| 209 | GOISCDS_CDS3159 | Glufosinate |
| 209 | GOISCDS_CDS3159 | Sulfosate |
| 209 | GOISCDS_CDS3159 | Fenoxaprop |
| 209 | GOISCDS_CDS3159 | Paraquat |
| 209 | GOISCDS_CDS3159 | Cycloxydim |
| 209 | GOISCDS_CDS3159 | Profoxydim |
| 209 | GOISCDS_CDS3159 | Sethoxydim |
| 209 | GOISCDS_CDS3159 | Tepraloxydim |
| 209 | GOISCDS_CDS3159 | Pendimethalin |
| 209 | GOISCDS_CDS3159 | Acifluorfen |
| 209 | GOISCDS_CDS3159 | Imazamethabenz |
| 209 | GOISCDS_CDS3159 | Imazamox |
| 209 | GOISCDS_CDS3159 | Imazapic |
| 209 | GOISCDS_CDS3159 | Imazapyr |
| 209 | GOISCDS_CDS3159 | Imazaquin |
| 209 | GOISCDS_CDS3159 | Imazethapyr |
| 209 | GOISCDS_CDS3159 | 2,4-D |
| 209 | GOISCDS_CDS3159 | Chloridazon |
| 209 | GOISCDS_CDS3159 | Picloram |
| 209 | GOISCDS_CDS3159 | Picolinafen |
| 209 | GOISCDS_CDS3159 | Cyclosulfamuron |
| 209 | GOISCDS_CDS3159 | Triflusulfuron |
| 209 | GOISCDS_CDS3159 | Atrazine |
| 209 | GOISCDS_CDS3159 | Pyroxasulfone |
| 209 | GOISCDS_CDS3159 | Bentazone |
| 209 | GOISCDS_CDS3159 | Cinidon-ethly |
| 209 | GOISCDS_CDS3159 | Cinmethylin |
| 209 | GOISCDS_CDS3159 | Dicamba |
| 209 | GOISCDS_CDS3159 | Diflufenzopyr |
| 209 | GOISCDS_CDS3159 | Quinclorac |
| 209 | GOISCDS_CDS3159 | Quinmerac |
| 209 | GOISCDS_CDS3159 | Mesotrione |
| 209 | GOISCDS_CDS3159 | Saflufenacil |
| 209 | GOISCDS_CDS3159 | Topramezone; |
| 210 | GOISCDS_{—} | acephate |
| 210 | GOISCDS_{—} | chlorpyrifos |
| 210 | GOISCDS_{—} | dimethoate |
| 210 | GOISCDS_{—} | methamidophos |
| 210 | GOISCDS_{—} | terbufos |
| 210 | GOISCDS_{—} | aldicarb |
| 210 | GOISCDS_{—} | carbofuran |
| 210 | GOISCDS_{—} | bifenthrin |
| 210 | GOISCDS_{—} | cypermethrin |
| 210 | GOISCDS_{—} | alpha-cypermethrin |
| 210 | GOISCDS_{—} | deltamethrin |
| 210 | GOISCDS_{—} | lambda-cyhalothrin |
| 210 | GOISCDS_{—} | tefluthrin |
| 210 | GOISCDS_{—} | flufenoxuron |
| 210 | GOISCDS_{—} | teflubenzuron |
| 210 | GOISCDS_{—} | spirotetramat; |
| 210 | GOISCDS_{—} | clothianidin |
| 210 | GOISCDS_{—} | imidacloprid |
| 210 | GOISCDS_{—} | thiamethoxam |
| 210 | GOISCDS_{—} | endosulfan |
| 210 | GOISCDS_{—} | fipronil |
| 210 | GOISCDS_{—} | abamectin |
| 210 | GOISCDS_{—} | spinosad |
| 210 | GOISCDS_{—} | spinetoram |
| 210 | GOISCDS_{—} | hydramethylnon; |
| 210 | GOISCDS_{—} | chlorfenapyr; |
| 210 | GOISCDS_{—} | indoxacarb |
| 210 | GOISCDS_{—} | metaflumizone |
| 210 | GOISCDS_{—} | flubendiamide |
| 210 | GOISCDS_{—} | chlorantraniliprole |
| 210 | GOISCDS_{—} | cyazypyr(HGW86) |
| 210 | GOISCDS_{—} | Azoxystrobin |
| 210 | GOISCDS_{—} | Dimoxystrobin |
| 210 | GOISCDS_{—} | Kresoxim-methyl |
| 210 | GOISCDS_{—} | Orysastrobin |
| 210 | GOISCDS_{—} | Pyraclostrobin |
| 210 | GOISCDS_{—} | Trifloxystrobin |
| 210 | GOISCDS_{—} | Bixafen |
| 210 | GOISCDS_{—} | Boscalid |
| 210 | GOISCDS_{—} | Isopyrazam |
| 210 | GOISCDS_{—} | Metalaxyl |
| 210 | GOISCDS_{—} | Penthiopyrad |
| 210 | GOISCDS_{—} | 3-Difluoromethyl-1- |
| | | methyl-1H-pyrazole- |
| | | 4-carboxylic acid(2′, |
| | | 4′,5′-trifluoro- |
| | | biphenyl-2-yl)-amide |
| 210 | GOISCDS_{—} | Dimethomorph |
| 210 | GOISCDS_{—} | Difenoconazole |
| 210 | GOISCDS_{—} | Epoxiconazole |
| 210 | GOISCDS_{—} | Fluquinconazole |
| 210 | GOISCDS_{—} | Metconazol |
| 210 | GOISCDS_{—} | Propiconazole |
| 210 | GOISCDS_{—} | Prothioconazole |
| 210 | GOISCDS_{—} | Tebuconazole |
| 210 | GOISCDS_{—} | Triticonazole |
| 210 | GOISCDS_{—} | Prochloraz |
| 210 | GOISCDS_{—} | Carbendazim |
| 210 | GOISCDS_{—} | Cyprodinil |
| 210 | GOISCDS_{—} | Pyrimethanil |
| 210 | GOISCDS_{—} | Fenpropimorph |
| 210 | GOISCDS_{—} | Tridemorph |
| 210 | GOISCDS_{—} | Iprodione |
| 210 | GOISCDS_{—} | 5-ethyl-6-octyl-[1,2,4]triazolo[1, |
| | | 5-a]pyrimidine- |
| | | 7-ylamine |
| 210 | GOISCDS_{—} | Mancozeb |
| 210 | GOISCDS_{—} | Maneb |
| 210 | GOISCDS_{—} | Metiram |
| 210 | GOISCDS_{—} | Dithianon |
| 210 | GOISCDS_{—} | Chlorothalonil |
| 210 | GOISCDS_{—} | ThiophanateMethyl |
| 210 | GOISCDS_{—} | Cymoxanil |
| 210 | GOISCDS_{—} | Metrafenone |
| 210 | GOISCDS_{—} | Acetochlor |
| 210 | GOISCDS_{—} | Dimethenamid |
| 210 | GOISCDS_{—} | Metolachlor |
| 210 | GOISCDS_{—} | Metazachlor |
| 210 | GOISCDS_{—} | Glyphosate |
| 210 | GOISCDS_{—} | Glufosinate |
| 210 | GOISCDS_{—} | Sulfosate |
| 210 | GOISCDS_{—} | Fenoxaprop |
| 210 | GOISCDS_{—} | Paraquat |
| 210 | GOISCDS_{—} | Cycloxydim |
| 210 | GOISCDS_{—} | Profoxydim |
| 210 | GOISCDS_{—} | Sethoxydim |
| 210 | GOISCDS_{—} | Tepraloxydim |
| 210 | GOISCDS_{—} | Pendimethalin |
| 210 | GOISCDS_{—} | Acifluorfen |
| 210 | GOISCDS_{—} | Imazamethabenz |
| 210 | GOISCDS_{—} | Imazamox |
| 210 | GOISCDS_{—} | Imazapic |
| 210 | GOISCDS_{—} | Imazapyr |
| 210 | GOISCDS_{—} | Imazaquin |
| 210 | GOISCDS_{—} | Imazethapyr |
| 210 | GOISCDS_{—} | 2,4-D |
| 210 | GOISCDS_{—} | Chloridazon |
| 210 | GOISCDS_{—} | Picloram |
| 210 | GOISCDS_{—} | Picolinafen |
| 210 | GOISCDS_{—} | Cyclosulfamuron |
| 210 | GOISCDS_{—} | Triflusulfuron |
| 210 | GOISCDS_{—} | Atrazine |
| 210 | GOISCDS_{—} | Pyroxasulfone |
| 210 | GOISCDS_{—} | Bentazone |
| 210 | GOISCDS_{—} | Cinidon-ethly |
| 210 | GOISCDS_{—} | Cinmethylin |
| 210 | GOISCDS_{—} | Dicamba |
| 210 | GOISCDS_{—} | Diflufenzopyr |
| 210 | GOISCDS_{—} | Quinclorac |
| 210 | GOISCDS_{—} | Quinmerac |
| 210 | GOISCDS_{—} | Mesotrione |
| 210 | GOISCDS_{—} | Saflufenacil |
| 210 | GOISCDS_{—} | Topramezone; |
| 211 | GOICDS_CDS0644_7 | acephate |
| 211 | GOICDS_CDS0644_7 | chlorpyrifos |
| 211 | GOICDS_CDS0644_7 | dimethoate |
| 211 | GOICDS_CDS0644_7 | methamidophos |
| 211 | GOICDS_CDS0644_7 | terbufos |
| 211 | GOICDS_CDS0644_7 | aldicarb |
| 211 | GOICDS_CDS0644_7 | carbofuran |
| 211 | GOICDS_CDS0644_7 | bifenthrin |
| 211 | GOICDS_CDS0644_7 | cypermethrin |
| 211 | GOICDS_CDS0644_7 | alpha-cypermethrin |
| 211 | GOICDS_CDS0644_7 | deltamethrin |
| 211 | GOICDS_CDS0644_7 | lambda-cyhalothrin |
| 211 | GOICDS_CDS0644_7 | tefluthrin |
| 211 | GOICDS_CDS0644_7 | flufenoxuron |
| 211 | GOICDS_CDS0644_7 | teflubenzuron |
| 211 | GOICDS_CDS0644_7 | spirotetramat; |
| 211 | GOICDS_CDS0644_7 | clothianidin |
| 211 | GOICDS_CDS0644_7 | imidacloprid |
| 211 | GOICDS_CDS0644_7 | thiamethoxam |
| 211 | GOICDS_CDS0644_7 | endosulfan |
| 211 | GOICDS_CDS0644_7 | fipronil |
| 211 | GOICDS_CDS0644_7 | abamectin |
| 211 | GOICDS_CDS0644_7 | spinosad |
| 211 | GOICDS_CDS0644_7 | spinetoram |
| 211 | GOICDS_CDS0644_7 | hydramethylnon; |
| 211 | GOICDS_CDS0644_7 | chlorfenapyr; |
| 211 | GOICDS_CDS0644_7 | indoxacarb |
| 211 | GOICDS_CDS0644_7 | metaflumizone |
| 211 | GOICDS_CDS0644_7 | flubendiamide |
| 211 | GOICDS_CDS0644_7 | chlorantraniliprole |
| 211 | GOICDS_CDS0644_7 | cyazypyr(HGW86) |
| 211 | GOICDS_CDS0644_7 | Azoxystrobin |
| 211 | GOICDS_CDS0644_7 | Dimoxystrobin |
| 211 | GOICDS_CDS0644_7 | Kresoxim-methyl |
| 211 | GOICDS_CDS0644_7 | Orysastrobin |
| 211 | GOICDS_CDS0644_7 | Pyraclostrobin |
| 211 | GOICDS_CDS0644_7 | Trifloxystrobin |
| 211 | GOICDS_CDS0644_7 | Bixafen |
| 211 | GOICDS_CDS0644_7 | Boscalid |
| 211 | GOICDS_CDS0644_7 | Isopyrazam |
| 211 | GOICDS_CDS0644_7 | Metalaxyl |
| 211 | GOICDS_CDS0644_7 | Penthiopyrad |
| 211 | GOICDS_CDS0644_7 | 3-Difluoromethyl-1- |
| | | methyl-1H-pyrazole- |
| | | 4-carboxylic |
| | | acid(2′,4′,5′-trifluoro- |
| | | biphenyl-2-yl)-amide |
| 211 | GOICDS_CDS0644_7 | Dimethomorph |
| 211 | GOICDS_CDS0644_7 | Difenoconazole |
| 211 | GOICDS_CDS0644_7 | Epoxiconazole |
| 211 | GOICDS_CDS0644_7 | Fluquinconazole |
| 211 | GOICDS_CDS0644_7 | Metconazol |
| 211 | GOICDS_CDS0644_7 | Propiconazole |
| 211 | GOICDS_CDS0644_7 | Prothioconazole |
| 211 | GOICDS_CDS0644_7 | Tebuconazole |
| 211 | GOICDS_CDS0644_7 | Triticonazole |
| 211 | GOICDS_CDS0644_7 | Prochloraz |
| 211 | GOICDS_CDS0644_7 | Carbendazim |
| 211 | GOICDS_CDS0644_7 | Cyprodinil |
| 211 | GOICDS_CDS0644_7 | Pyrimethanil |
| 211 | GOICDS_CDS0644_7 | Fenpropimorph |
| 211 | GOICDS_CDS0644_7 | Tridemorph |
| 211 | GOICDS_CDS0644_7 | Iprodione |
| 211 | GOICDS_CDS0644_7 | 5-ethyl-6-octyl-[1,2,4]triazolo[1, |
| | | 5-a]pyrimidine- |
| | | 7-ylamine |
| 211 | GOICDS_CDS0644_7 | Mancozeb |
| 211 | GOICDS_CDS0644_7 | Maneb |
| 211 | GOICDS_CDS0644_7 | Metiram |
| 211 | GOICDS_CDS0644_7 | Dithianon |
| 211 | GOICDS_CDS0644_7 | Chlorothalonil |
| 211 | GOICDS_CDS0644_7 | ThiophanateMethyl |
| 211 | GOICDS_CDS0644_7 | Cymoxanil |
| 211 | GOICDS_CDS0644_7 | Metrafenone |
| 211 | GOICDS_CDS0644_7 | Acetochlor |
| 211 | GOICDS_CDS0644_7 | Dimethenamid |
| 211 | GOICDS_CDS0644_7 | Metolachlor |
| 211 | GOICDS_CDS0644_7 | Metazachlor |
| 211 | GOICDS_CDS0644_7 | Glyphosate |
| 211 | GOICDS_CDS0644_7 | Glufosinate |
| 211 | GOICDS_CDS0644_7 | Sulfosate |
| 211 | GOICDS_CDS0644_7 | Fenoxaprop |
| 211 | GOICDS_CDS0644_7 | Paraquat |
| 211 | GOICDS_CDS0644_7 | Cycloxydim |
| 211 | GOICDS_CDS0644_7 | Profoxydim |
| 211 | GOICDS_CDS0644_7 | Sethoxydim |
| 211 | GOICDS_CDS0644_7 | Tepraloxydim |
| 211 | GOICDS_CDS0644_7 | Pendimethalin |
| 211 | GOICDS_CDS0644_7 | Acifluorfen |
| 211 | GOICDS_CDS0644_7 | Imazamethabenz |
| 211 | GOICDS_CDS0644_7 | Imazamox |
| 211 | GOICDS_CDS0644_7 | Imazapic |
| 211 | GOICDS_CDS0644_7 | Imazapyr |
| 211 | GOICDS_CDS0644_7 | Imazaquin |
| 211 | GOICDS_CDS0644_7 | Imazethapyr |
| 211 | GOICDS_CDS0644_7 | 2,4-D |
| 211 | GOICDS_CDS0644_7 | Chloridazon |
| 211 | GOICDS_CDS0644_7 | Picloram |
| 211 | GOICDS_CDS0644_7 | Picolinafen |
| 211 | GOICDS_CDS0644_7 | Cyclosulfamuron |
| 211 | GOICDS_CDS0644_7 | Triflusulfuron |
| 211 | GOICDS_CDS0644_7 | Atrazine |
| 211 | GOICDS_CDS0644_7 | Pyroxasulfone |
| 211 | GOICDS_CDS0644_7 | Bentazone |
| 211 | GOICDS_CDS0644_7 | Cinidon-ethly |
| 211 | GOICDS_CDS0644_7 | Cinmethylin |
| 211 | GOICDS_CDS0644_7 | Dicamba |
| 211 | GOICDS_CDS0644_7 | Diflufenzopyr |
| 211 | GOICDS_CDS0644_7 | Quinclorac |
| 211 | GOICDS_CDS0644_7 | Quinmerac |
| 211 | GOICDS_CDS0644_7 | Mesotrione |
| 211 | GOICDS_CDS0644_7 | Saflufenacil |
| 211 | GOICDS_CDS0644_7 | Topramezone; |
| 213 | | acephate |
| 213 | | chlorpyrifos |
| 213 | | Dimethoate |
| 213 | | carbofuran |
| 213 | | bifenthrin |
| 213 | | cypermethrin |
| 213 | | tefluthrin |
| 213 | | flufenoxuron |
| 213 | | teflubenzuron |
| 213 | | thiamethoxam |
| 213 | | endosulfan |
| 213 | | fipronil |
| 213 | | hydramethylnon; |
| 213 | | chlorfenapyr; |
| 213 | | indoxacarb |
| 213 | | cyazypyr(HGW86) |
| 213 | | Azoxystrobin |
| 213 | | Dimoxystrobin |
| 213 | | Trifloxystrobin |
| 213 | | Bixafen |
| 213 | | Boscalid |
| 213 | | 3-Difluoromethyl-1- |
| | | methyl-1H-pyrazole- |
| | | 4-carboxylic |
| | | acid(2′,4′,5′-trifluoro- |
| | | biphenyl-2-yl)-amide |
| 213 | | Dimethomorph |
| 213 | | Difenoconazole |
| 213 | | Propiconazole |
| 213 | | Prothioconazole |
| 213 | | Tebuconazole |
| 213 | | Cyprodinil |
| 213 | | Pyrimethanil |
| 213 | | Fenpropimorph |
| 213 | | Mancozeb |
| 213 | | Maneb |
| 213 | | Metiram |
| 213 | | Cymoxanil |
| 213 | | Metrafenone |
| 213 | | Acetochlor |
| 213 | | Glyphosate |
| 213 | | Glufosinate |
| 213 | | Sulfosate |
| 213 | | Fenoxaprop |
| 213 | | Tepraloxydim |
| 213 | | Pendimethalin |
| 213 | | Acifluorfen |
| 213 | | Imazapyr |
| 213 | | Imazaquin |
| 213 | | Imazethapyr |
| 213 | | Picolinafen |
| 213 | | Cyclosulfamuron |
| 213 | | Triflusulfuron |
| 213 | | Cinidon-ethly |
| 213 | | Cinmethylin |
| 213 | | Dicamba |
| 213 | | Mesotrione |
| 213 | | Saflufenacil |
| 213 | | methamidophos |
| 213 | | terbufos |
| 213 | | aldicarb |
| 213 | | alpha-cypermethrin |
| 213 | | deltamethrin |
| 213 | | lambda-cyhalothrin |
| 213 | | spirotetramat; |
| 213 | | clothianidin |
| 213 | | imidacloprid |
| 213 | | abamectin |
| 213 | | spinosad |
| 213 | | spinetoram |
| 213 | | metaflumizone |
| 213 | | flubendiamide |
| 213 | | chlorantraniliprole |
| 213 | | Kresoxim-methyl |
| 213 | | Orysastrobin |
| 213 | | Pyraclostrobin |
| 213 | | Isopyrazam |
| 213 | | Metalaxyl |
| 213 | | Penthiopyrad |
| 213 | | Epoxiconazole |
| 213 | | Fluquinconazole |
| 213 | | Metconazol |
| 213 | | Triticonazole |
| 213 | | Prochloraz |
| 213 | | Carbendazim |
| 213 | | Tridemorph |
| 213 | | Iprodione |
| 213 | | 5-ethyl-6-octyl-[1,2,4]triazolo[1, |
| | | 5-a]pyrimidine- |
| | | 7-ylamine |
| 213 | | Dithianon |
| 213 | | Chlorothalonil |
| 213 | | ThiophanateMethyl |
| 213 | | Dimethenamid |
| 213 | | Metolachlor |
| 213 | | Metazachlor |
| 213 | | Paraquat |
| 213 | | Cycloxydim |
| 213 | | Profoxydim |
| 213 | | Sethoxydim |
| 213 | | Imazamethabenz |
| 213 | | Imazamox |
| 213 | | Imazapic |
| 213 | | 2,4-D |
| 213 | | Chloridazon |
| 213 | | Picloram |
| 213 | | Atrazine |
| 213 | | Pyroxasulfone |
| 213 | | Bentazone |
| 213 | | Diflufenzopyr |
| 213 | | Quinclorac |
| 213 | | Quinmerac |
| 213 | | Topramezone; |

The application's sequence listing, which the Patent Office published only in electronic form, follows.

SEQUENCE LISTING (277 sequences)

SEQ ID NO: 1 - protein, 141 aa, Physcomitrella patens
MRLAAKDTSGRNAFKFRNIDLNKAPSAWDTEEVSASNTGDTTSFRGVRHRPELNKWVTEIRPTSQKRKIWLGTYETPEEAARAYDVGIFYTKKKIPYNFEDSPQQLQLYPIPPELPWESFAALVKQRATSAAKRARVPSSS

SEQ ID NO: 2 - protein, 401 aa, Arabidopsis thaliana
MRGRSLTLSRVKLELARRSMSATSVPSMADFLTKKPYSPPSWASHLRPLPSHTFSLAHLPTPIHRWNLPGLPNGTELWIKRDDFTGMELSGNKVRKLEFLMAEAVDQHADTVITIGGIQSNHCRATATASNYLNLNSHLILRTSKLLADEDPGLVGNLLVERLVGANVHLISKEEYSSIGSEALTNALKEKLEKEGKKPYVIPVGGSNSLGTWGYIEAAREIEEQLNYRPDDLKFDDIVVACGSGGTIAGISLGSWLGALKAKVHAFSVCDDPDYFYDFVQGLLDGLHAGVNSRDIVNIHNAKGKGYAMNTSEELEFVKKVASSTGVILDPVYSGKAAYGLINEITKDPKCWEGRKILFIHTGGLLGLYDKVDQMASLMGNWSRMDVSESVPRKDGVGKMF

SEQ ID NO: 3 - protein, 424 aa, Arabidopsis thaliana
MAIPFMETVVGFMIVMYIFETYLDLRQLTALKLPTLPKTLVGVISQEKFEKSRAYSLDKSYFHFVHEFVTILMDSAILFFGILPWFWKMSGAVLPRLGLDPENEILHTLSFLAGVMTWSQITDLPFSLYSTFVIESRHGFNKQTIWMFIRDMIKGTFLSVILGPPIVAAIIFIVQKGGPYLAIYLWAFMFILSLVMMTIYPVLIAPLFNKFTPLPDGDLREKIEKLASSLKFPLKKLFVVDGSTRSSHSNAYMYGFFKNKRIVLYDTLIQQCKNEDEIVAVIAHELGHWKLNHTTYSFIAVQILAFLQFGGYTLVRNSTDLFRSFGFDTQPVLIGLIIFQHTVIPLQHPVSFGLNLVSRAFEFQADAFAVKLGYAKDLRPTLVKLQEENLSAMNTDPLYSAYHYSHPPLVERLRAIDGEDKKTD

SEQ ID NO: 4 - protein, 303 aa, Physcomitrella patens
MDLDQWLEKVKSGNYLLEDELKQLCEYVKEILVEESNVQPVNSPVTVCGDIHGQFHDLMKLFQTGGHVPSTNYIFMGDFVDRGYNSLEVFTILLLLKARYPAHMTLLRGNHESRQITQVYGFYDECQRKYGNPNAWRYCTDVFDYLTLSAIIDGRVLCVHGGLSPDIRTIDQIRVIERQCEIPHEGPFCDLMWSDPEDIETWAVSPRGAGWLFGARVTSEFNHINGLELVCRAHQLVQEGLKYMFPDKGLVTVWSAPNYCYRCGNVASILSFNENMERDVKFFTETEENQAMMAPRAGVPYFL

SEQ ID NO: 5 - protein, 339 aa, Physcomitrella patens
MVVPSLPAFGGQNAMLRRNIDNNTDTLISLLQGSCSPRVSMQQVPRSSESLENMMGACGQKLPYFSSFDGPSVEEQEDVDEGIDEFAHHVEKKRRLSLEQVRSLERNFEVENKLEPERKMQLAKELGLRPRQVAVWFQNRRARWKTKQLEHDYETLKKAYDRLKADFEAVTLDTNALKAEVSRLKGISNDDVKPAEFVQGKCDTTSHPASPAQSERSDIVSSRNRTTPTIHVDPVAPEEAGAHLTMSSDSNSSEVMDADSPRTSHTSASRSTLSTSVVQPDEGLGVAQYPHFSPENFVGPNMPEICADQSLASQVKLEEIHSFNPDQTFLLLPNWWDWA

SEQ ID NO: 6 - protein, 516 aa, Physcomitrella patens
MITVIALASVMGVLLFIGIVWLILLRRSLDEKTSPSVVGPLHAYFNPKPEGVQLIQLRMNAYFNSKPEGSLLSGSMASSTTISYGSSMANYTCTAKTFTLAELERATDNFRPDNVVGEGGFGRVYQGVLDSGIEVAVKVLTRDDHEGGREFVAEVEMLSRLHHRNLAKLIGICTEEIRCLVYELITNGSVESHLHGLDKYTAPLNWDARVKIALGAARGLAYLHEDSQPRVIHRDFKGSNILLEDDYTPKVSDFGLAKSATEGGKEHISTRVMGTFGYVAPEYAMTGHLLVKSDVYSYGVVLLELLSGRKPVDMSQPPGQENLVTWARPLLTSKDGLEQLVDPYLKDNFPFDHFAKVAAIASMCVQPEVSHRPFMGEVVQALKLVCNETEAKDVGQAKGTVSPTSDLAETQNTGFLRDATFISVDYDSGPFETLDLEQRKRKPLSASATMSGSGGFLRQLSDSFRRYSVSAPPKAASLPRTSWYALGSSKPVGSMSEARAARFLDPQRRRFYGFWP

SEQ ID NO: 7 - protein, 258 aa, Physcomitrella patens
MSTEKERESYVYMAKLAEQAERYDEMVESMKKVAKLDVELTVEERNLLSVGYKNVIGARRASWRIMSSIEQKEESKGNEQNVKRIKDYRHKVEEELSKICNDILSIIDGHLIPSSSTGESTVFYYKMKGDYYRYLAEFKTGNERKEAADQSLKAYQAASSTAVTDLAPTHPIRLGLALNFSVFYYEILNSPERACHLAKQAFDEAIAELDTLSEESYKDSTLIMQLLRDNLTLWTSDLQDEGGDDQGKGDDMRPEEAE

SEQ ID NO: 8 - protein, 634 aa, Physcomitrella patens
MCSIPFGRKKSKKGDLAQDLLGDVFSTYSENGKLDAEGLLKFLQTEQGDSKSSLDDAKHLVELIRNERHKSKFPGFIVSSDLSKGDFKNYVLSPDLNGVLESTVHQDMTQPLSHYFIFTGHNSYLTGNQLSSDSSDVPIAAALQRGVRVVELDLWPDDKGGIKVTHGNTLTSPVAFEKCIKAIKANAFVSSKYPVVITLEDHLSSPLQALAAETLTNILGEDLYYPPSSDGFKELPSPESLKGKILISTKPPKEYLEAAVAQKSALKDEKILNEFKKADKLQEQSTAPVKSPVEKKIAVPPSEKTKSISEEKDLSEKVGNLRVDSEGESADPAPASSPDGKKATLTADSESDDDDNKKNPEYARLITIHQSKPSKGTTVEDRLKVEGTVVRISLSETKLEKVTEEFPELVVKFTQRNILRVYPAGNRVNSSNYDPTAAWIHGAQMVAQNMQGYGKELWQAHGKFRGNGGCGYILKPKYLLEDLPNGKPFNPSAPGDTKMILKVKVMTTMGWDKAFPKYHFDLFSPPDFFTRLLVTGVPADVAKWKTSVIDDVWEPHWNEDHEFYLKCPELALLRIEVRDHDEESQDEFEGQACLPMHEIKDGYRCVQMYDKKGSVLKGVKMLFHFQKRSFSPVQ

SEQ ID NO: 9 - protein, 333 aa, Physcomitrella patens
MSKARVYTDVNVQRPKDYWDYEALTVQWGDQDDYEVVRKVGRGKYSEVFEGVNAVNSERCVMKILKPVKKKKIKREIKILQNLCGGPNIVKLLDIVRDQQSKTPSLIFEYVNNTDFKVLYPTLTDFDIRYYIHELLKALDYCHSQGIMHRDVKPHNVMIDHEQRKLRLIDWGLAEFYHPGKEYNVRVASRYFKGPELLVDLQDYDYSLDMWSLGCMFAGMIFRKEPFFYGHDNYDQLVKIAKVLGTDELNSYLNKYRLELDPHLEALVGRHSRKPWSKFINADNQRLVVPEAVDFLDKLLRYDHQDRLTAKEAMAHPYFYPVKVSEVSNRRSA

SEQ ID NO: 10 - protein, 751 aa, Physcomitrella patens
MRGAVVDAPMKGDRRACILGGMGRPNGGTILYVLVISFIALVNGATDPNDVSALNTMFTGFNSDPKLTNWVQNAGDPCGTNWLGVTCDGTFVTSIKLSNMGLNGKVEGWVLQKFQHLSVLDLSHNNLASGIPEMFPPKLTELDLSYNQLTGSFPYLIINIPTLTSIKLNNNKLSGTLDGQVFSKLTNLITLDISNNAITGPIPEGMGDMVSLRFLNMQNNKLTGPIPDTLANIPSLETLDVSNNALTGFLPPNLNPKNFRYGGNPLNTQAPPPPPFTPPPPSKNPKPIPPPPHPGSRTPDTAPKAEGGIVSGAAIAGIVVGAILVLAAIFIAVWFFVVRKRSELTKPLDLEANHSSRRTWFLPLIPAGKEKPPKMKVFEADTFEKEVEEPKIKALPPLKSLKVPPALKVEEATYKVESEGKVNKSNITAREFSVAELQAATDSFSEDNLLGEGSLGCVYRAEFPDGEVLAVKKLDTTASMVRNEDDFLSVVDGLARLQHTNSNELVGYCAEHGQRLLVYKFISRGTLHELLHGSADSPKELSWNVRVKIALGCARALEYFHEIVSQPVVHRNFRSSNILLDDELNPHVSDCGLAAFTPSSAERQVSAQVLGSFGYSPPEFSTSGMYDVKSDVYSFGVVMLELMTGRKPLDSSRPRSEQNLVRWATPQLHDIDALARMVDPALEGAYPAKSLSRFADIVALCVQPEPEFRPPISEVVQSLVRLMQRAALSKRRHEYNAGVPQTDMEDPSDYL

SEQ ID NO: 11 - protein, 901 aa, Physcomitrella patens
MENNDALDIGAVSSPYPSQSEGVSTPLPQVTSPSFDNAASPVAGRRAVRQTPTSAVRRRGRETDSARRRRSRSRSLGNSVYSSPYDAGTPGTPGTPVATPVYATPVGTPMGTPSFHRGTPQYKQRSELGSQGKPLHRRRRSQSREPGHRSPSREPSADGRPSESAEPDDTLGGEYAYVWGTNVNIPDVLRAIRRFLHNYRSSAHDLNSKYIQIIEETVEREEDTLNIDMSDIYDHDPDLYAKIVRYPLDIIPLLDTECQEVATSLLPTFEKHIEARPFNLKASVHMRELNPSDIDKLVSVKGMVIRCSSIIPEIKGAFFKCLVCGHSPPLVTVVKGRVEEPTRCEKPECAARNAMSLIHNRCTFANKQIVRLQETPDAIPEGETPHTVSMCLYNTMVDAVKPGDRIEVTGVFKAMAVRVGPNQRTLRALYKTYIDCVHVKKSDRGRLQTEDPMEMDKENDMYAGYHESDTSEAANEAKIQKLKELSKLPGIYDRLSRSLAPSIWELEDIKKGLLCQLFGGKAKKIPSGASFRGDINVLLVGDPGTSKSQLLQYVHKIAPRGIYTSGRGSSAVGLTAYVTKDPETRETVLESGALVLSDRGICCIDEFDKMSDNARSMLHEVMEQQTVSVAKGGIIASLNARTSVLACANPSGSRYNARLSVIDNIQLPPTLLSRFDLIYLMLDKPDEQNDRRLARHLVALHYENYEVSKQDALDLQTLTAYITYARQHVHPTLSDEAAEDLINGYVEMRQKGNFPGSSKKVITATPRQLESMIRISEALARMRFSEVVEKVDAAEAVRLLDVALQQSATDHATGTIDMDLITTGVSASERIRRANLLAALRELIADKISPGSSSGLKTSQLLEDIRSQSSVDVSLQDIKNALGSLQGEGFLTVHGDIVKRV

SEQ ID NO: 12 - protein, 311 aa, Physcomitrella patens
MSVPPISSNGQLDTQIAQLIQCKPLSEVEVRGLCEKAKEILMRENNVQPVKCPVTICGDIHGQFHDLAELFRIGGMCPDTNYLFMGDYVDRGYYSVETATLLVALKVRYPDRITILRGNHESRQITQVYGFYDECLRKYGNANVWKIFTDLFDYFPLTALVESEIFCLHGGLSPSIDSLDHIRDLDRVQEVPHEGPMCDLLWSDPDDRCGWGISPRGAGYTFGQDISEQFNHNNNLKLVARAHQLVMEGYNWGHEHKVVTIFSAPNYCYRCGNMASILEVDDNMGHTFIQFEPAPRRGEPDVTRRTPDYFL

SEQ ID NO: 13 - protein, 450 aa, Physcomitrella patens
MVMRKVGKYEVGRTIGEGTFAKVKFAQNTETGESVAMKVLDRQTVLKHKMVEQIRREISIMKLVRHPNVVRLHEVLASRCKIYIILEFVTGGELFDKIVHQGRLNENDSRKYFQQLMDGVDYCHSKGVSHRDLKPENLLLDSLDNLKISDFGLSALPQQVREDGLLHTTCGTPNYVAPEVLNDKGYDGAVADIWSCGVILFVLMAGFLPFDEADLNTLYSKIREADFTCPPWFSSGAKTLITNILDPNPLTRIRMRGIRDDEWFKKNYVPVRMYDDEDINLDDVETAFDDSKEQFVKEQREVKDVGPSLMNAFELISLSQGLNLSALFDRRQDHVKRQTRFTSKKPARDIINRMETAAKSMGFGVGTRNYKMRLEAASECRISQHLAVAIEVYEVAPSLFMIEVRKAAGDTLEYHKFYKSFCTRLKDIIWTTAVDKDEVKTLTPSVVKNK

SEQ ID NO: 14 - protein, 822 aa, Physcomitrella patens
METSAVELQMSTDAVHQRETGERPPLEQTAQDEETSREALHADEAAYREKEGPFRRLSRKLTRPDSLDVESMRVKEMDHAAPVASFSFILKLAYQSIGVVYGDLGTSPLYVYSSTFTSGIKTNDDILGVLCLIIYTIIATPLVKYIFIVLRANDNGEGGTFALYSLICRHVKLSGAHAQQPTDLNISSYKLETPSTKMARATRIKEALEKSRAWQNVLLLIVLLGPCLVIGDGSLTPAISVLSAIQGISVNVSGLSPNVSVIITVVVLAALFSLQRFGTHRVAFLFGPAMLAWFFSIGIIGLYNIFRWDPSVFKALNPWYGLNYFIRNKVDAWASLGGIVLCITGSEAMFADLGHFTVKSMQVAFTFLVFPSLLCAYIGQASFLMKNQLDDDVAYTFYRSVPKPIYWPMFGVATCAAIIASQAMISATYSMIRNAMSLGCFPRVTIVHTSKKVHGQIYIPEINWIIMVLSITIVGGFRSTTQIGHAYGIAVVGVFFISTCLLTLIMLMIWQTNIFLCALFFTVFFIIEGIYFSAVLSKVTQGGWVPLVIAACFLTIMYSWNFGTRMKRLYEVSHKISLDWVLSLGHSLGISRVPGVGLVYTELPQGVPAIFRHFISNLPAIHSTLVFVCIRHISVSTVPEDERILIRRLGPRNYRMFRCAVRYGYTDHVDGAESDGQTFENMLLASLERFIRTEAAEVTPESGLASSHAASPSHHKLDRPCESSVSNDSCGSDIGAKTVDELEADQEAYTNEEVLFLQKAREAGVVYVLGDSDIHAKSDSWFPKRIIINKIYKFLRRNCRNNTLYLSIPKDRLLKVGMEYYV

SEQ ID NO: 15 - protein, 657 aa, Physcomitrella patens
MSVQYRPELGTMVLTPGYPPGKEREYLSDTANSQQTPSYYGAQKSYADGQRQSAYGMKNKSHSSPVSPLSPQDSSQAASDNGQRMSAGWSSASYQSESSSHSDGSLEGPGKLEEADYYGRQHRHGEQLTGSVAYHNTPSSVLRPMGYPAETAQAYQMPNYQQAVRYIPEEQYAQSQSNYAQRNPEMAHMLQVLESALLDDDDGADLPGSLGNGHDPASEGNWADTIEEFMAADASPADSSTVTSATTPPEYGKQCRNGSTNNYTGAATARVEEPPPQKLVVGTRSRSEQLLVACAEALSNNDMPLANVLIAQLNQVVSIYGDPMQRLAAYMVEGLVARVAASGKGIYRSLKCKDPPTRDLLSAMQILYEVCPYFKFGYMAANGSIAEAFQNESRVHIIDFQIAQGTQWTTLIQALAARPGGPPHLRITGIDDPMPGPNSNAGVEMVGKRLAKLAEAVGVPFDFHPVAKKGPEVEAWMLERQPGEALAVNFALHLHHMPDESVCTSNPRDRILHMVKALNPKVVTLVEQESNTNTAPFFPRFLEAMNYYAAIFESLDITLARESKERVNVEQQCLARDIVNIIACEGIDRVERHEMMGKWRARLTMAGFRPYPLSQTVNNTIKTLLESYSDKYRLKDEGGALYLGWKNRSLIVSSAWQ

SEQ ID NO: 16 - protein, 204 aa, Physcomitrella patens
MNPEYDYLFKLLLIGDSGVGKSCLLLRFADDSYLESYISTIGVDFKIRTVELDGKTIKLQIWDTAGQERFRTITSSYYRGAHGIIVVYDVTDQESFNNVKQWLSEIDRYASENVNKLLVGNKSDLASKKVVDYATAKAFADEIGIPFLETSAKNATNVEQAFMTMAAEIKNRMASQPALSSTSRPNNVTNLRGQAIPQKSGCCS

SEQ ID NO: 17 - protein, 385 aa, Bromus inermis
MAVMSRSRRLAAPALLVLLALAAVAVAETTLDGAEVAPGKEESSWAGWAKDKVSEGLGLDKISEGLGLKHHADEEEAARKAGHTVKSARETAQHAASETGRQASGKVGDAKEAAEQAATGAANKAGQAKDKAAETVKGTAGEASKKAEQAKHKTKEAAEAAAKTGAETHERSKQGKAKVEEMAREWYERAKHTAGEGYETLKQTKDAAAEKAAAAKDAATNKAGAATQTAAEKAAAAKDTAAGKAKAAKDAAWEETGSAKDATWQAQEKLKQYNDAASEKAAAAKDADAEKAAAAKDAAWKNAEAAKGTVGEKAGAAKDATLEKTESAKDAAWETAEAAKGKANEGYEKVKEKDATKEKLGEVKDKVTGAASDGKAKKHRNGDEL

SEQ ID NO: 18 - protein, 256 aa, Arabidopsis thaliana
MVADKSKKSKIEEKGEEENLEQIDAELVLSIEKLQEIQDDLEKINEKASDEVLEVEQKYNVIRKPVYDKRNEVIQSIPGFWMTAFLSHPALGDLLTEEDQKIFKYLNSLEVEDAKDVKSGYSITFHFTSNPFFEDAKLTKTFTFLEEGTTKITATPIKWKEGKGLPNGVNHDDKKGNKRALPEESFFTWFTDAQHKEDAGDEIHDEVADIIKEDLWSNPLTYFNNDADEEDFDGDDDGDEEGEEDDDDEEEEDGEE

SEQ ID NO: 19 - protein, 501 aa, Arabidopsis thaliana
MANLRLMITLITVLMITKSSNGIKIDLPKSLNLTLSTDPSIISAASHDFGNITTVTPGGVICPSSTADISRLLQYAANGKSTFQVAARGQGHSLNGQASVSGGVIVNMTCITDVVVSKDKKYADVAAGTLWVDVLKKTAEKGVSPVSWTDYLHITVGGTLSNGGIGGQVFRNGPLVSNVLELDVITGKGEMLTCSRQLNPELFYGVLGGLGQFGIITRARIVLDHAPKRAKWFRMLYSDFTTFTKDQERLISMANDIGVDYLEGQIFLSNGVVDTSFFPPSDQSKVADLVKQHGIIYVLEVAKYYDDPNLPIISKVIDTLTKTLSYLPGFISMHDVAYFDFLNRVHVEENKLRSLGLWELPHPWLNLYVPKSRILDFHNGVVKDILLKQKSASGLALLYPTNRNKWDNRMSAMIPEIDEDVIYIIGLLQSATPKDLPEVESVNEKIIRFCKDSGIKIKQYLMHYTSEEDWIEHFGSKWDDFSKRKDLFDPKKLLSPGQDIF

SEQ ID NO: 20 - protein, 363 aa, Arabidopsis thaliana
MDKYELVKDIGAGNFGVARLMKVKNSKELVAMKYIERGPKIDENVAREIINHRSLRHPNIIRFKEVVLTPTHLAIAMEYAAGGELFERICSAGRFSEDEARYFFQQLISGVSYCHAMQICHRDLKLENTLLDGSPAPRLKICDFGYSKSSLLHSRPKSTVGTPAYIAPEVLSRREYDGKMADVWSCGVTLYVMLVGAYPFEDQEDPKNFRKTIQKIMAVQYKIPDYVHISQDCKNLLSRIFVANSLKRITIAEIKKHSWFLKNLPRELTETAQAAYFKKENPTFSLQTVEEIMKIVADAKTPPPVSRSIGGFGWGGNGDADGKEEDAEDVEEEEEEVEEEEDDEDEYDKTVKEVHASGEVRIS

SEQ ID NO: 21 - protein, 81 aa, Arabidopsis thaliana
MSCCGGNCGCGSGCKCGNGCGGCKMYPDLGFSGETTTTETFVLGVAPAMKNQYEASGESNNAENDACKCGSDCKCDPCTCK

SEQ ID NO: 22 - protein, 210 aa, Arabidopsis thaliana
MQQHLMQMQPMMAGYYPSNVTSDHIQQYLDENKSLILKIVESQNSGKLSECAENQARLQRNLMYLAAIADSQPQPPSVHSQYGSAGGGMIQGEGGSHYLQQQQATQQQQMTQQSLMAARSSMLYAQQQRQQQPYATLQHQQSHHSQLGMSSSSGGGGSSGLHILQGEAGGFHDFGRGKPEMGSGGGGEGRGGSSGDGGETLYLKSSDDGN

SEQ ID NO: 23 - protein, 453 aa, Arabidopsis thaliana
MENKSHSNHHRYHHLSSRSHEQNQRGLISINAIIIIGISIISIFIILAILLIIILLHRLKSARVKAQELSCKESFNNMNNGGASTNYSYTSSPDDIKRDCLYSRNPTSFRQLPPQTKSCRRSRAEGVEVYTYKELEIATNNFSEEKKIGNGDVYKGVLSDGTVAAIKKLHMFNDNASNQKHEERSFRLEVDLLSRLQCPYLVELLGYCADQNHRILIYEFMPNGTVEHHLHDHNFKNLKDRPQPLDWGARLRIALDCARALEFLHENTISTVIHRNFKCTNILLDQNNRAKVSDFGLAKTGSDKLNGEISTRVIGTTGYLAPEYASTGKLTTKSDVYSYGIVLLQLLTGRTPIDSRRPRGQDVLVSWALPRLTNREKISEMVDPTMKGQYSQKDLIQVAAIAAVCVQPEASYRPLMTDVVHSLIPLVKAFNKSTDSSRFPSRRESLSFDDIMP

SEQ ID NO: 24 - protein, 744 aa, Arabidopsis thaliana
MEAMLVDCVNNSLRHFVYKNAIFMCERLCAEFPSEVNLQLLATSYLQNNQAYSAYHLLKGTQMAQSRYLFALSCFQMDLLNEAESALCPVNEPGAEIPNGAAGHYLLGLIYKYTDRRKNAAQQFKQSLTIDPLLWAAYEELCILGAAEEATAVFGETAALSIQKQYMQQLSTSLGLNTYNEERNSTSTKNTSSEDYSPRQSKHTQSHGLKDISGNFHSHGVNGGVSNMSFYNTPSPVAAQLSGIAPPPLFRNFQPAVANPNSLITDSSPKSTVNSTLQAPRRKFVDEGKLRKISGRLFSDSGPRRSSRLSADSGANINSSVATVSGNVNNASKYLGGSKLSSLALRPVTLRKGHSWANENMDEGVRGEPFDDSRPNTASTTGSMASNDQEDETMSIGGIAMSSQTITIGVSEILNLLRTLGEGCRLSYMYRCQEALDTYMKLPHKHYNTGWVLSQVGKAYFELIDYLEAEKAFRLARLASPYCLEGMDIYSTVLYHLKEDMKLSYLAQELISTDRLAPQSWCAMGNCYSLQKDHETALKNFLRAVQLNPRFAYAHTLCGHEYTTLEDFENGMKSYQNALRVDTRHYNAWYGLGMIYLRQEKLEFSEHHFRMAFLINPSSSVIMSYLGTSLHALKRSEEALEIMEQAIVADRKNPLPMYQKANILVCLERLDEALEVLEELKEYAPSESSVYALMGRIYKRRNMHDKAMLHFGLALDMKPPATDVAAIKAAMEKLHVPDEIDESP

SEQ ID NO: 25 - protein, 354 aa, Arabidopsis thaliana
MELLMCSGQAESGGSSSTESSSLSGGLRFGQKIYFEDGSGSRSKNRVNTVRKSSTTARCQVEGCRMDLSNVKAYYSRHKVCCIHSKSSKVIVSGLHQRFCQQCSRFHQLSEFDLEKRSCRRRLACHNERRRKPQPTTALFTSHYSRIAPSLYGNPNAAMIKSVLGDPTAWSTARSVMQRPGPWQINPVRETHPHMNVLSHGSSSFTTCPEMINNNSTDSSCALSLLSNSYPIHQQQLQTPTNTWRPSSGFDSMISFSDKVTMAQPPPISTHQPPISTHQQYLSQTWEVIAGEKSNSHYMSPVSQISEPADFQISNGTTMGGFELYLHQQVLKQYMEPENTRAYDSSPQHFNWSL

SEQ ID NO: 26 - protein, 546 aa, Beta vulgaris
MDEYSNRKSSGLAISRRGPSLVLRDSAENNKDRNVQVCSRVGCGSKLNSVKDAKVSSPSKVKSPKTPFRSSAQGKETIGSSSRTLASPSPFKKSLSDRKKKLPSNLDTDSEMCSLQDESEEVSGKTRIRVQPEPEDHDSIEASSSEAGSSSSGPSNRLANRNTQRFGLGRQDSAASSASFSLNKTNQGQRNGGGGGASANRYNLRQLKCNSISDVVPSGSPQSAESSLSKKRDTGCRKRNGEAESSLPVRGKKINGATQDDRRNDYPNRGISISDTRRTRSSSPGNNDVTSVRSRRSVARTRLSNQDTRDRLPLVESPLRNPSSPLPESSTGGTDFSLENQFSGRTPAGSLSSYNRPGGGSEHMRPSRSIDPYEAGIARSFMNRDTLRQYNLDGIAEMLLALERIEQEEDPTYEQLLVLETNLFLGGLSFHDQHRDMRLDIDNMSYEELLALEESMGTVSTAVPEDDLAKCLKRNIYQGVADCREDEHDIKCSICQEEYGGGEEVGRLSCDHSYHIECINQWLRLKNWCPICKASASPSTSATPPP

SEQ ID NO: 27 - protein, 589 aa, Saccharomyces cerevisiae
MTISSAHPETEPKWWKEATIYQIYPASFKDSNNDGWGDMKGIASKLEYIKELGTDAIWISPFYDSPQDDMGYDIANYEKVWPTYGTNEDCFALIEKTHKLGMKFITDLVINHCSSEHEWFKESRSSKTNPKRDWFFWRPPKGYDAEGKPIPPNNWRSYFGGSAWTFDEKTQEFYLRLFCSTQPDLNWENEDCRKAIYESAVGYWLDHGVDGFRIDVGSLYSKVAGLPDAPVIDENSKWQLSDPFTMNGPRIHEFHQEMNKFIRNRVKDGREIMTVGEMRHATDETKRLYTSASRHELSELFNFSHTDVGTSPKFRQNLIPYELKDWKVALAELFRYVNGTDCWSTIYLENHDQPRSITRFGDDSPKNRVISGKLLSVLLVSLSGTLYVYQGQELGEINFKNWPIEKYEDVEVRNNYDAIKEEHGENSKEMKRFLEAIALISRDHARTPMQWSREEPNAGFSGPNAKPWFYLNESFREGINAEDESKDPNSVLNFWKEALRFRKAHKDITVYGYDFEFIDLDNKKLFSFTKKYDNKTLFAALNFSSDSIDFTIPNNSSSFKLEFGNYPRSEVDASSRTLKPWEGRIYISE

SEQ ID NO: 28 - protein, 525 aa, Saccharomyces cerevisiae
MAAGEQVSNMFDTILVLDFGSQYSHLITRRLREFNIYAEMLPCTQKISELGWTPKGVILSGGPYSVYAEDAPHVDHAIFDLNVPILGICYGMQELAWINGKQVGRGDKREYGPATLKVIDDSNSLFKGMNDSTVWMSHGDKLHGLPTGYKTIATSDNSPYCGIVHETKPIYGIQFHPEVTHSTQGKTLLKNFAVDLCHAKQNWTMENFIDTEINRIRKLVGPTAEVIGAVSGGVDSTVASKLMTEAIGDRFHAILVDNGVLRLNEAANVKKTLVEGLGINLMVVDASEEFLSKLKGVTDPEKKRKIIGNTFIHVFEREAEKIKPKDGKEIQFLLQGTLYPDVIESISFKGPSQTIKTHHNVGGLLENMKLKLIEPLRELFKDEVRHLGELLGIPHDLVWRHPFPGPGIAIRVLGEVTKEQVEIARKADNIYIEEIKKAGLYNQISQAFACLLPVKSVGVMGDQRTYDQVIALRAIETTDFMTADWFPFEHSFLKKVASRIVNEVDGVARVTYDITSKPPATVEWE

SEQ ID NO: 29 - protein, 249 aa, Oryza sativa
MGRGPVQLRRIENKINRQVTFSKRRNGLLKKAHEISVLCDADVALIVFSTKGKLYEFSSHSSMEGILERYQRYSFDERAVLEPNTEDQENWGDEYGILKSKLDALQKSQRQLLGEQLDTLTIKELQQLEHQLEYSLKHIRSKKNQLLFESISELQKKEKSLKNQNNVLQKLMETEKEKNNAIINTNREEQNGATPSTSSPTPVTAPDPIPTTNNSQSQPRGSGESEAQPSPAQAGNSKLPPWMLRTSHT

SEQ ID NO: 30 - protein, 275 aa, Oryza sativa
MKRKRPAALRGGEEAAAAALKRGPWTPEEDEVLARFVAREGCDRWRTLPRRAGLLRCGKSCRLRWMNYLRPDIKRCPIADDEEDLILRLHRLLGNRWSLIAGRLPGRTDNEIKNYWNSHLSKKLIAQGIDPRTHKPLTAAADHSNAAAAVAATSYKKAVPAKPPRTASSPAAGIECSDDRARPADGGGDFAAMVSAADAEGFEGGFGDQFCAEDAVHGGFDMGSASAMVGDDDFSSFLDSLINDEQLGDLFVVEGNDHEHGNGEIGHGDVMESKQ

SEQ ID NO: 31 - protein, 105 aa, Oryza sativa
MEGVGARQRRNPLIPRPNGSKRHLQHQHQPNAAEKKTAATSNYFSIEAFLVLVFLTMSLLILPLVLPPLPPPPSLLLLLPVCLLILLVVLAFMPTDVRSMASSYL

SEQ ID NO: 32 - protein, 487 aa, Oryza sativa
MASSTGGLDHGFTFTPPPFITSFTELLSGGGGDLLGAGGEERSPRGFSRGGARVGGGVPKFKSAQPPSLPLSPPPVSPSSYFAIPPGLSPTELLDSPVLLSSSHILASPTTGAIPAQRYDWKASADLIASQQDDSRGDFSFHTNSDAMAAQPASFPSFKEQEQQVVESSKNGAAAASSNKSGGGGNNKLEDGYNWRKYGQKQVKGSENPRSYYKCTYNGCSMKKKVERSLADGRITQIVYKGAHNHPKPLSTRRNASSCATAAACADDLAAPGAGADQYSAATPENSSVTFGDDEADNASHRSEGDEPEAKRWKEDADNEGSSGGMGGGAGGKPVREPRLVVQTLSDIDILDDGFRWRKYGQKVVKGNPNPRSYYKCTTVGCPVRKHVERASHDTRAVITTYEGKHNHDVPVGRGGGGGRAPAPAPPTSGAIRPSAVAAAQQGPYTLEMLPNPAGLYGGYGAGAGGAAFPRTKDERRDDLFVESLLC

SEQ ID NO: 33 - protein, 429 aa, Escherichia coli
METTQTSTIASKDSRSAWRKTDTMWMLGLYGTAIGAGVLFLPINAGVGGMIPLIIMAILAFPMTFFAHRGLTRFVLSGKNPGEDITEVVEEHFGIGAGKLITLLYFFAIYPILLVYSVAITNTVESFMSHQLGMTPPPRAILSLILIVGMMTIVRFGEQMIVKAMSILVFPFVGVLMLLALYLIPQWNGAALETLSLDTASATGNGLWMTLWLAIPVMVFSFNHSPIISSFAVAKREEYGDMAEQKCSKILAFAHIMMVLTVMFFVFSCVLSLTPADLAAAKEQNISILSYLANHFNAPVIAWMAPIIAIIAITKSFLGHYLGAREGFNGMVIKSLRGKGKSIEINKLNRITALFMLVTTWIVATLNPSILGMIETLGGPIIAMILFLMPMYAIQKVPAMRKYSGHISNVFVVVMGLIAISAIFYSLFS

SEQ ID NO: 34 - protein, 302 aa, Saccharomyces cerevisiae
MFSRLSRSHSKALPIALGTVAIAAATAFYFANRNQHSFVFNESNKVFKGDDKWIDLPISKIEEESHDTRRFTFKLPTEDSEMGLVLASALFAKFVTPKGSNVVRPYTPVSDLSQKGHFQLVVKHYEGGKMTSHLFGLKPNDTVSFKGPIMKWKWQPNQFKSITLLGAGTGINPLYQLAHHIVENPNDKTKVNLLYGNKTPQDILLRKELDALKEKYPDKFNVTYFVDDKQDDQDFDGEISFISKDFIQEHVPGPKESTHLFVCGPPPFMNAYSGEKKSPKDQGELIGILNNLGYSKDQVFKF

SEQ ID NO: 35 - protein, 199 aa, Saccharomyces cerevisiae
MDKIREKLSNLKLEAESWQEKYEELKEKNKDLEQENVEKENQIKSLTVKNQQLEDEIEKLEAGLSDSKQTEQDNVEKENQIKSLTVKNHQLEEEIEKLEAELAESKQLSEDSHHLQSNNDNFSKKNQQLEEDLEESDTKLKETTEKLRESDLKADQLERRVAALEEQREEWERKNEELTVKYEDAKKELDEIAASLENL

SEQ ID NO: 36 - protein, 620 aa, Saccharomyces pastorianus
MRDSNHRSLTSNKPIVTITSTVYDRRALDINSSIPLINSLNYLTYLTSNSSKVRETVANDGALERLVSILRSCHLSLFELLDLDLENFNEHENIKDLWKEKRLALCAWKWTLTFQCLVLTGTRGTEQIRKKVVMSGVLSVLVTVLDNYLLYHKNYDFIKDQTMTFDFKGITTETMYKFMRKDENETYQQYIEFITGQDKLKLSTDKNFLNERLVAPSMTIPTDFSDIWGRFADLASNFEPDQERHDDDIDIDSEVESENFDAHKNFFSQPDINRPTISTPREFFLGRIVPKQDDVIWSLQLLAFVSKYTYMKSTLQNVELVESLSFRSMAYKIKQRISEENDLEEQERDVTVKLSSLYPYLSKNPENNSKVKALDTSKMDPFFKELEELSNRCQQEEQNEICNNHCPVLNLFERYRVPKPSDDNAYGKDKERINLRKKISDNFERRWSYDKMKKELTNIVYKNKVLTNVVNIFPLVEKYTVSAENTHDVIYWSSVIMRNSCRKNEILGVRQCANFSCGKWEDFPRQFAKCRRCKRTKYCSRKCQLKAWGYHRYWCHEVGSSHMRSTNTTTGVNTPNEPSSLNATATTAADVSNSTSTFTPNISTTVPDEISNRDENSIPE

SEQ ID NO: 37 - protein, 246 aa, Saccharomyces cerevisiae
MESIFGGFGDLVVPRPKEHLGQTDLSFGGKLLPALKICEDGGESGCGGKVWIAGELLCEYILEKSVDHLLSKTVNGTKQFKKVLELGSGTGLVGLCVGLLEKNTFHDGTKVYVTDIDKLIPLLKRNIELDEVQYEVLARELWWGEPLSADFSPQEGAMQANNVDLVLAADCVYLEEAFPLLEKTLLDLTHCINPPVILMAYKKRRKADKHFFNKIKRNFDVLEITDFSKFEHYLKERTHLFQLIRK

SEQ ID NO: 38 - protein, 244 aa, Saccharomyces cerevisiae
MTVVEIKSQDQFTQLTTTNAANKLIVLYFKAQWADPCKTMSQVLEAVSEKVRQEDVRFLSIDADEHPEISDLFEIAAVPYFVFIQNGTIVKEISAADPKEFVKSLEILSNASASLANNAKGPKSTSDEESSGSSDDEEDETEEEINARLVKLVQAAPVMLFMKGSPSEPKCGFSRQLVGILREHQIRFGFFDILRDENVRQSLKKFSDWPTFPQLYINGEFQGGLDIIKESIEEDPEYFQHALQ

SEQ ID NO: 39 - protein, 244 aa, Saccharomyces cerevisiae; identical to SEQ ID NO: 38

SEQ ID NO: 40 - protein, 309 aa, Saccharomyces cerevisiae
MSAVFNNATLSGLVQASTYSQTLQNVAHYQPQLNFMEKYWAAWYSYMNNDVLATGLMFFLLHEFMYFFRCLPWFIIDQIPYFRRWKLQPTKIPSAKEQLYCLKSVLLSHFLVEAIPIWTFHPMCEKLGITVEVPFPSLKTMALEIGLFFVLEDTWHYWAHRLFHYGVFYKYIHKQHHRYAAPFGLSAEYAHPAETLSLGFGTVGMPILYVMYTGKLHLFTLCVWITLRLFQAVDSHSGYDFPWSLNKIMPFWAGAEHHDLHHHYFIGNYASSFRWWDYCLDTESGPEAKASREERMKKRAENNAQKKTN

SEQ ID NO: 41 - protein, 294 aa, Arabidopsis thaliana
MDQYEKVEKIGEGTYGVVYKARDEVTNETIALKKIRLEQEDEGVPSTAIREISLLKEMQHSNIVKLQDVVHSEKRLYLVFEYLDLDLKKHMDSTPDFSKDLHMIKTYLYQILRGIAYCHSHRVLHRDLKPQNLLIDRRTNSLKLADFGLARAFGIPVRTFTHEVVTLWYRAPEILLGSHHYSTPVDIWSVGCIFAEMISQKPLFPGDSEIDQLFKIFRIMGTPYEDTWRGVTSLPDYKSAFPKWKPTDLETFVPNLDPDGVDLLSKMLLMDPTKRINARAALEHEYFKDLGGMP

SEQ ID NO: 42 - protein, 129 aa, Arabidopsis thaliana
MEKYEKLEKVGEGTYGKVYKAMEKTTGKLVALKKTRLEMDEEGIPPTALREISLLQMLSQSIYIVRLLCVEHVIQSKDSTVSHSPKSNLYLVFEYLDTDLKKFIDSHRKGSNPRPLEASLVQRFMFQLF

SEQ ID NO: 43 - protein, 310 aa, Arabidopsis thaliana
MANPWWVGNVAIGGVESPVTSSAPSLHHRNSNNNNPPTMTRSDPRLDHDFTTNNSGSPNTQTQSQEEQNSRDEQPAVEPGSGSGSTGRRPRGRPPGSKNKPKSPVVVTKESPNSLQSHVLEIATGADVAESLNAFARRRGRGVSVLSGSGLVTNVTLRQPAASGGVVSLRGQFEILSMCGAFLPTSGSPAAAAGLTIYLAGAQGQVVGGGVAGPLIASGPVIVIAATFCNATYERLPIEEEQQQEQPLQLEDGKKQKEENDDNESGNNGNEGSMQPPMYNMPPNFIPNGHQMAQHDVYWGGPPPRAPPSY

SEQ ID NO: 44 - protein, 575 aa, Arabidopsis thaliana
MGLTSSLRFHRQNNKTFLGIFMILVLSCIPGRTNLCSNHSVSTPKELPSSNPSDIRSSLVSLDLEGYISFDDVHNVAKDFGNRYQLPPLAILHPRSVFDISSMMKHIVHLGSTSNLTVAARGHGHSLQGQALAHQGVVIKMESLRSPDIRIYKGKQPYVDVSGGEIWINILRETLKYGLSPKSWTDYLHLTVGGTLSNAGISGQAFKHGPQINNVYQLEIVTGKGEVVTCSEKRNSELFFSVLGGLGQFGIITRARISLEPAPHMVKWIRVLYSDFSAFSRDQEYLISKEKTFDYVEGFVIINRTDLLNNWRSSFSPNDSTQASRFKSDGKTLYCLEVVKYFNPEEASSMDQETGKLLSELNYIPSTLFSSEVPYIEFLDRVHIAERKLRAKGLWEVPHPWLNLLIPKSSIYQFATEVFNNILTSNNNGPILIYPVNQSKWKKHTSLITPNEDIFYLVAFLPSAAPNSSGKNDLEYLLKQNQRVMNFCAAANLNVKQYLPHYETQKEWKSHFGKRWETFAQRKQAYDPLAILAPGQRIFQKTTGKLSPIQLAKSKATGSPQRYHYASILPKPRTV

SEQ ID NO: 45 - protein, 506 aa, Arabidopsis thaliana
MDRVVAKIAKIRSQLTKLRSLFFLYFIYFLFFSFLGFLALKITKPRTTSRPHDFDLFFTSVSAITVSSMSTVDMEVFSNTQLIFLTILMFLGGEIFTSFLNLYVSYFTKFVFPHNKIRHILGSYNSDSSIEDRCDVETVTDYREGLIKIDERASKCLYSVVLSYHLVTNLVGSVLLLVYVNFVKTARDVLSSKEISPLTFSVFTTVSTFANCGFVPTNENMIIFRKNSGLIWLLIPQVLMGNTLFPCFLVLLIWGLYKITKRDEYGYILKNHNKMGYSHLLSVRLCVLLGVTVLGFLIIQLLFFCAFEWTSESLEGMSSYEKLVGSLFQVVNSRHTGETIVDLSTLSPAILVLFILMMYLPPYTLFMPLTEQKTIEKEGGDDDSENGKKVKKSGLIVSQLSFLTICIFLISITERQNLQRDPINFNVLNITLEVISAYGNVGFTTGYSCERRVDISDGGCKDASYGFAGRWSPMGKFVLIIVMFYGRFKQFTAKSGRAWILYPSSS

SEQ ID NO: 46 - protein, 275 aa, Arabidopsis thaliana
MGGSMSERARQANIPPLAGPLKCPRCDSSNTKFCYYNNYNLTQPRHFCKGCRRYWTQGGALRNVPVGGGCRRNNKKGKNGNLKSSSSSSKQSSSVNAQSPSSGQLRTNHQFPFSPTLYNLTQLGGIGLNLAATNGNNQAHQIGSSLMMSDLGFLHGRNTSTPMTGNIHENNNNNNNENNLMASVGSLSPFALFDPTTGLYAFQNDGNIGNNVGISGSSTSMVDSRVYQTPPVKMEEQPNLANLSRPVSGLTSPGNQTNQYFWPGSDFSGPSNDLL

SEQ ID NO: 47 - protein, 209 aa, Arabidopsis thaliana
MENGKRDRQDMEVNTTPRKPRVLLAASGSVAAIKFGNLCHCFTEWAEVRAVVTKSSLHFLDKLSLPQEVTLYTDEDEWSSWNKIGDPVLHIELRRWADVLVIAPLSANTLGKIAGGLCDNLLTCIIRAWDYTKPLFVAPAMNTLMWNNPFTERHLLSLDELGITLIPPIKKRLACGDYGNGAMAEPSLIYSTVRLFWESQAHQQTGGTS

SEQ ID NO: 48 - protein, 223 aa, Arabidopsis thaliana
MQQSPQMIPMVLPSFPPTNNITTEQIQKYLDENKKLIMAILENQNLGKLAECAQYQALLQKNLMYLAAIADAQPQPPAATLTSGAMTPQAMAPNPSSMQPPPSYFMQQHQAVGMAQQIPPGIFPPRGPLQFGSPHQFLDPQQQLHQQAMQGHMGIRPMGLNNNNGLQHQMHHHETALAANNAGPNDASGGGKPDGTNMSQSGADGQGGSAARHGGGDAKTEGK

SEQ ID NO: 49 - protein, 349 aa, Oryza sativa
MDPGRVVFDSGVARRACPGGAQMLLFGGGGSANSGGFFRGVPAAVLGMDESRSSSSAAGAGAKRPFFTTHEELLEEEYYDEQAPEKKRRLTAEQVQMLERSFEEENKLEPERKTELARRLGMAPRQVAVWFQNRRARWKTKQLEHDFDRLKAAYDALAADHHALLSDNDRLRAQVISLTEKLQDKETSPSSATITTAAQEVDQPDEHTEAASTTGFATVDGALAAPPPGHQQPPHKDDLVSSGGTNDDGDGGAAVVVFDVTEGANDRLSCESAYFADAAEAYERDCAGHYALSSEEEDGGAVSDEGCSFDLPDAAAAAAAMFGAAGVVHHDAADDEEAQLGSWTAWFWS

SEQ ID NO: 50 - protein, 224 aa, Oryza sativa
MKSRKNSTTSTKAAGSCHTSSSGGGGGGGNCYSSSSSKMERKDVEKNRRLHMKGLCLKLSSLIPAAAPRRHHHHYSTSSSSSPPSSTKEAVTQLDHLEQAAAYIKQLKGRIDELKKRKQQAAALTTSTSNGGGGGMPVVEVRCQDGTLDVVVVSEAIREERERAVRLHEVIGVLEEEGAEVVNASFSVVGDKIFYTLHSQALCSRIGLDASRVSHRLRNLLLQY

SEQ ID NO: 51 - protein, 294 aa, Oryza sativa
MEQYEKEEKIGEGTYGVVYRARDKVTNETIALKKIRLEQEDEGVPSTAIREISLLKEMHHGNIVRLHDVIHSEKRIYLVFEYLDLDLKKFMDSCPEFAKNPTLIKSYLYQILRGVAYCHSHRVLHRDLKPQNLLIDRRTNALKLADFGLARAFGIPVRTFDHEVVTLWYRAPEILLGSRQYSTPVDMWSVGCIFAEMVNQKPLFPGDSEIDELFKIFRVLGTPNEQSWPGVSSLPDYKSAFPKWQAQDLATIVPTLDPAGLDLLSKMLRYEPNKRITARQALEHEYFKDLEMVQ

SEQ ID NO: 52 - protein, 227 aa, Arabidopsis thaliana
MALEALTSPRLASPIPPLFEDSSVFHGVEHWTKGKRSKRSRSDFHHQNLTEEEYLAFCLMLLARDNRQPPPPPAVEKLSYKCSVCDKTFSSYQALGGHKASHRKNLSQTLSGGGDDHSTSSATTTSAVTTGSGKSHVCTICNKSFPSGQALGGHKRCHYEGNNNINTSSVSNSEGAGSTSHVSSSHRGFDLNIPPIPEFSMVNGDDEVMSPMPAKKPRFDFPVKLQL

SEQ ID NO: 53 - protein, 273 aa, Arabidopsis thaliana
MALEAMNTPTSSFTRIETKEDLMNDAVFIEPWLKRKRSKRQRSHSPSSSSSSPPRSRPKSQNQDLTEEEYLALCLLMLAKDQPSQTRFHQQSQSLTPPPESKNLPYKCNVCEKAFPSYQALGGHKASHRIKPPTVISTTADDSTAPTISIVAGEKHPIAASGKIHECSICHKVFPTGQALGGHKRCHYEGNLGGGGGGGSKSISHSGSVSSTVSEERSHRGFIDLNLPALPELSLHHNPIVDEEILSPLTGKKPLLLTDHDQVIKKEDFSLKI

SEQ ID NO: 54 - protein, 542 aa, Saccharomyces cerevisiae
MAGATSSIIRENDFEDELAESMQSYNRETADKLALTRTESVKPEPEITAPPHSRFSRSFKTVLIAQCAFTGFFSTIAGAIYYPVLSVIERKFDIDEELVNVTVVVYFVFQGLAPTFMGGFADSLGRRPVVLVAIVIYFGACIGLACAQTYAQIIVLRCLQAAGISPVIAINSGIMGDVTTRAERGGYVGYVAGFQVLGSAFGALIGAGLSSRWGWRAIFWFLAIGSGICFLASFLILPETKRNISGNGSVTPKSYLNRAPILVLPTVRKSLHLDNPDYETLELPTQLNLLAPFKILKAYEICILMLVAGLQFAMYTTHLTALSTALSKQYHLTVAKVGLCYLPSGICTLCSIVIAGRYLNWNYRRRLKYYQNWLGKKRSKLLEEHDNDLNLVQRIIENDPKYTFNIFKARLQPAFVTLLLSSSGFCAYGWCITVKAPLAAVLCMSGFASLFSNCILTFSTTLIVDLFPTKTSTATGCLNLFRCILSAVFIAALSKMVEKMKFGGVFTFLGALTSSSSILLFILLRKGKELAFKRKKQELGVN

SEQ ID NO: 55 - protein, 542 aa, Saccharomyces cerevisiae; identical to SEQ ID NO: 54

SEQ ID NO: 56 - protein, 181 aa, Saccharomyces cerevisiae
MRQLTEEETKVVFEKLAGYIGRNISFLVDNKELPHVFRLQKDRVYYVPDHVAKLATSVARPNLMSLGICLGKFTKTGKFRLHITSLTVLAKHAKYKIWIKPNGEMPFLYGNHVLKAHVGKMSDDIPEHAGVIVFAMNDVPLGFGVSAKSTSESRNMQPTGIVAFRQADIGEYLRDEDTLFT

SEQ ID NO: 57 - protein, 546 aa, Zea mays
MASSTGSLEHGGFTFTPPPFITSFTELLSGAAADMVGAAGADHQERSPRGLFHRGATRGGGVGVPKFKSAQPPSLPISPPPMSPSSYFSIPPGLSPAELLDSPVLLHSSSNFFASPTTGAIPAQRFDWKQAADLIASQSQQDDSRAAVGSAFNDFSFHAPTMPAQTTSFPSFKEQQQQQVEAATKSAVPSSNKASGGSGGGTKLEDGYNWRKYGQKQVKGSENPRSYYKCTYHSCSMKKKVERSLADGRVTQIVYKGAHNHPKPLSTRRNSSGGVAAAEEQAANNSSLSGCGGPEHSGGATAENSSVTFGDDEAENGSQRSGGDEPDAKRWKAEDGENEGSSGAGGGKPVREPRLVVQTLSDIDILDDGFRWRKYGQKVVKGNPNPRSYYKCTTAGCPVRKHVERACHDARAVITTYEGKHNHDVPVGRGAASRAAAAAAAGSGALMATGGGQLGYQQHQQQQPYTLEMLSSGSYGGGGYVPRRRQPSCCCGGGGFAFSSGFDNPMGSYMSQHQQQQRQNDAMHASRAKEEPREDMFFPTSLLYTD

SEQ ID NO: 58 - protein, 420 aa, Oryza sativa
MYGRMPKKSNNTKYYEVLGVSKTATQDELKKAYRKAAIKNHPDKGGDPEKFKELAQAYEVLNDPEKREIYDQYGEDALKEGMGGGSSSDFHSPFDLFEQIFQNRGGFGGRGHRQKRGEDVVHTMKVSLEDLYNGTTKKLSLSRNALCTKCKGKGSKSGAAATCHGCHGAGMRTITRQIGLGMIQQMNTVCPECRGSGEMISDKDKCPSCKGNKVVQQKKVLEVHVEKGMQHGQKIVFQGEADEAPDTVTGDIVFVLQLKDHPKFKRKFDDLFTEHTISLTEALCGFQFVLTHLDGRQLLIKSNPGEVIKPGQHKAINDEGMPQHGRPFMKGRLFVEFNVEFPEPGALTPGQCRSLEKILPPRPRNQLSDMELDQCEETTMHDVNIEEEMRRRQQHRRQEAYDEDDDEDAGAGPRVQCAQQ

SEQ ID NO: 59 - protein, 294 aa, Oryza sativa; identical to SEQ ID NO: 51

SEQ ID NO: 60 - protein, 98 aa, Zea mays
MEGGAAIQRRNAVKRHLQQRQQEADFLDKKVIASTYFSIGAFLVLACLTVSLLILPLVLPPLPPPPSLLLWLPVCLLVLLVVLAFMPTDVRSMASSYL

SEQ ID NO: 61 - protein, 267 aa, Oryza sativa
MGRGKVQLKRIENKINRQVTFSKRRNGLLKKAHEISVLCDAEVAAIVFSPKGKLYEYATDSRMDKILERYERYSYAEKALISAESESEGNWCHEYRKLKAKIETIQKCHKHLMGEDLESLNLKELQQLEQQLESSLKHIISRKSHLMLESISELQKKERSLQEENKALQKELVERQKNVRGQQQVGQWDQTQVQAQAQAQPQAQTSSSSSSMLRDQQALLPPQNICYPPVMMGERNDAAAAAAVAAQGQVQLRIGGLPPWMLSHLNA

SEQ ID NO: 62 - protein, 272 aa, Zea mays
MDPSAVSFDSGGTRRGGGAQMLLFGGGGSANSNGFFRGVPMAVLGMDDATRVGKRPFFTTHEELLEEEYYDEQAPEKKRRLTAEQVQLLERSFEEENKLEPERKTELARRLGMAPRQVAVWFQNRRARWKTKQLETDYDRLKAAYDALAADHQGLLADNDNLRAQVISLTEKLQGKETSPSATTAAQEVDQPDEHTAVSGTEELLAQQLKDNLHSSGDCTGHGTLSSEEDDGGVVSDEGCSFALPDAMFAAGFTHHGAEEVQLANWTSMFWN

SEQ ID NO: 63 - protein, 332 aa, Zea mays
MESGRLIFNAPGSGAGQMLFLDCGAGGGPGGGLFHRGGRPMLGLEEGRGVKRPFFTSPDELLEEEYYDEQLPEKKRRLTPEQVLLLERSFEEENKLEPERKTELARKLGLQPRQVAVWFQNRRARWKTKQLERDFDRLKASFDALRADHDALLQDNNRLRSQVVSLTEKLQEKEDATEGGATADTAAPAVDVEASLADDVEEPAEPAATFEVLQEVKSEDRLSTGSGGSAVVDADALLYGRFAAAVDSSVESYFPGGEDHYHDCGTMGPVNHGAGGGIQSDDDGAGSDEGCSYYADEAAAAAAAAAFFAGHATHHHADEDEDAGQISWWMWN

SEQ ID NO: 64 - protein, 211 aa, Arabidopsis thaliana
MARGKIQLKRIENPVHRQVTFCKRRTGLLKKAKELSVLCDAEIGVVIFSPQGKLFELATKGTMEGMIDKYMKCTGGGRGSSSATFTAQEQLQPPNLDPKDEINVLKQEIEMLQKGISYMFGGGDGAMNLEELLLLEKHLEYWISQIRSAKMDVMLQEIQSLRNKEGVLKNTNKYLLEKIEENNNSILDANFAVMETNYSYPLTMPSEIFQF

SEQ ID NO: 65 - protein, 535 aa, Oryza sativa
MGMEVAAARLGALYTTSDYASVVSINLFVALLCACIVLGHLLEENRWINESITALIIGLCTGVVILLMTKGKSSHLFVFSEDLFFIYLLPPIIFNAGFQVKKKQFFRNFMTITLFGAVGTMISFFTISIAAIAIFSRMNIGTLDVGDFLAIGAIFSATDSVCTLQVLNQDETPFLYSLVFGEGVVNDATSIVLFNALQNFDLVHIDAAVVLKFLGNFFYLFLSSTFLGVFAGLLSAYIIKKLYIGRHSTDREVALMMLMAYLSYMLAELLDLSGILTVFFCGIVMSHYTWHNVTESSRVTTKHAFATLSFIAETFLFLYVGMDALDIEKWEFASDRPGKSIGISSILLGLVLIGRAAFVFPLSFLSNLTKKAPNEKITWRQQVVIWWAGLMRGAVSIALAYNKFTRSGHTQLHGNAIMITSTITVVLFSTMVFGMMTKPLIRLLLPASGHPVTSEPSSPKSLHSPLLTSMQGSDLESTTNIVRPSSLRMLLTKPTHTVHYYWRKFDDALMRPMFGGRGFVPFSPGSPTEQSHGGR

SEQ ID NO: 66 - protein, 194 aa, Oryza sativa
MGKYMRKAKVVVSGEVVAAAVMELAAAPLGVRTRARSLALQKRQGGEYLELRSRRLEKLPPPPPPPPRRRATAAAATADATATESAEAEVSFGGENVLELEAMERNTRETTPCSLIRDPDTISTPGSTTRRSHSSSHCKVQTPVRHNIIPASAELEAFFAAEEQRQRQAFIDKYNFDPVNDCPLPGRFEWVKLD

SEQ ID NO: 67 - protein, 248 aa, Nicotiana tabacum
MLFYGPPGTGKTMVAREIARKSGLDYAMMTGGDVAPLGAQAVTKIHEIFDWAKKSNKGLLLFIDEADAFLCERNSTYMSEAQRSALNALLFRTGDQSRDVVLVLATNRPGDLDSAVTDRIDEVIEFPLPQEEERFKLLKLYLNKYLAGEGDSDSNSKWGHLFKKNQQKRITIQDLSDDVIREAAKKIEGFSGREIAKLMASVQATVYGSPDCVLDSQLFKEIVDYKVAEHHQRIKLAAEGMEPTYQGN

SEQ ID NO: 68 - protein, 459 aa, Nicotiana tabacum
MGDMKDKVKGFMKKVTSSSSGKFKGQGRVLGGSSSSGPSNHVNNFSSHPLNTRQDQQPSYTKTSPQKPSNSDQRIENICEIQFNKSESKDGFDPFGELVTSGKRNPKGYSLTNVFECPVCGSGFVSEEEVSTHIDSCLSSEVSSNLGVESKVEVKSELETCVSAYVSGKPSEGSVEVVIKLLKNIVKEPENAKFRKIRMGNPKIKGAIGDVVGGVELLEFVGFELKEEGGEIWAVMDVPSEEQLVMLKNVVSLLEPKKVEELASLSQVKASEPVEPKKIDRQIRVFFSVPESVAAKIELPDSFFNLSREELRREAEMRKKKLEDSKLLIPKSYREKQAKAARKKYTKSIIRVQFPDGALLQGVFLPSEPTSALYEFVSAALKEPSLEFELLHPVLVKKRVIPHFPAAGERAVTVEEEDLVPAALLKFKPIETDSVVFTGLCNELLEISEPLETGSVASS

SEQ ID NO: 69 - protein, 485 aa, Nicotiana tabacum
MASISAASATATASTKLAYPYSPSSSSSSSNTAAVFPSNSSKLILSSSFTPTPSTLFLHSPTTTPSTTHPRRFTVRAARGKFERKKPHVNIGTIGHVDHGKTTLTAALTMALASMGNSAPKKYDEIDAAPEERARGITINTATVEYETENRHYAHVDCPGHADYVKNMITGAAQMDGAILVVSGADGPMPQTKEHILLAKQVGVPNMVVFLNKQDQVDDEELLELVELEVRELLSSYEFPGDEIPIISGSALLALEALMANPSIKRGENQWVDKIYQLMDNVDEYIPIPQRQTELPFLMAIEDVFSITGRGTVATGRVERGTVKVGEIVDIVGLKDTRNTTVTGVEMFQKILDEAMAGDNVGLLLRGIQKIDIQRGMVLAKPGTITPHTKFEALVYVLKKEEGGRHSPFFAGYRPQFYMRTTDVTGKVTVIMSDKGEESKMVMPGDRVNMVVELIMPVACEQGMRFAIREGGKTVGAGVIQKILE

SEQ ID NO: 70 - protein, 606 aa, Nicotiana tabacum
MSRLIEHHLANNKQDMKGTEVFVGGLARTTTESKIHEVFSSCGEIVEIRLIKDQTGVPKGFCFVRFATKYAADKALKEKSGYVLDGKKLGVRPSVEQDTLFLGNLNKGWGAEEFESIVRQVFPDVVSVDLALLGDVQPGQKQRNRGFAFVKFPSHAAAARAFRVGSQSDFLIDGKLHPSVQWAEEPDPNELAQIKAAFVRNVPPGADEDYLKKLFQPFGNVERIALSRKGSSTIGFVYFDKRSDLDNAIMALNEKTVQGPMGGPSCKLQVEVARPMDKNRKRGREDPNMSSTIESHSKLLKDDPDVEMIRAPKSTAQLEMDYSDPYEAAVVALPVVVKERLVRILRLGIATRYDIDVESLTSLKILPQSAAISILDQFMLSGADMQNKGGYLASLISKQVEKLGPKQFDSRSRIEDVGLRVPEPDRFSTRVRLPDLDSYASRVPLPMPRTDVYTSHYSAYLDPHLSGRMTAKRMEEASSHLQATSLLSSRVATRMEEAGSTLQSLLSGGVTTRRMEEASPILQATLLPSGRVSRMDEASPNLQATWSPSPTNDRIGLHSHITATADHQHTRPRIRFDPFTGEPYKFDPFTGEPIVPKSSSHHRSLY

SEQ ID NO: 71 - protein, 475 aa, Nicotiana tabacum
MSVLQYPEGIDPADVQIWNNAAFDNGDSEDLSSLKRSWSPLKPLSVRPSDSFESDLSSKENQTPLFENSSVNLSSPLPIKPLNPNGALENSRLKPNKPNSKQSLDEMAARKSGKGNDFRDEKKIDEEIEEIQMEISRLSSRLEALRIEKAEKTVAKTVEKRGRVVAAKFMEPKQSVIKIEERISMSARTKVEQRRGLSLGPSEIFTGTRRRGLSMGPSDILAGTTKARQLGKQEMIITPIQPIQNRRKSCFWKLQEIEEEGKSSSLSPKSRKTAARTMVTTRQAVTTIASKKNLKKDDGLLSSVQPKKLFKDLEKSAAANKKPQRPGRVVASRYNQSTIQSSVVRKRSLPENDKDESKRNDKKRSLSVGKTRVSQTESKNLGTESRVKKRWEIPSEIVVHGNTESEKSPLSIIVKPDLLPRIRIARCVNETPRDSGPAKRMIELIGKKSFFSSDEDKEPPVCQVLSFAEEDAEEE

SEQ ID NO: 72 - protein, 224 aa, Saccharomyces cerevisiae
MHKTHSTMSGKSMKVIGVLALQGAFLEHTNHLKRCLAENDYGIKIEIKTVKTPEDLAQCDALIIPGGESTSMSLIAQRTGLYPCLYEFVHNPEKVVWGTCAGLIFLSAQLENESALVKTLGVLKVDVRRNAFGRQAQSFTQKCDFSNFIPGCDNFPATFIRAPVIERILDPIAVKSLYELPVNGKDVVVAATQNHNILVTSFHPELADSDTRFHDWFIRQFVSN

SEQ ID NO: 73 - protein, 1071 aa, Saccharomyces cerevisiae
MLDDDKGTAMHPHITPFTPEYSNELLRRVQDLYHEDIKHYYPQLKLEKLLDLLEHTEYLFELYLDSIHHDRPNDALTAFIIGCYYVFLIIPQSLQFQTRNKSYSIYTDLKKMYENEMNMTNVVLMVKKEIGVVLDESVKHGAGIEHRITKKRAFSVPADDLSGQVASLSLDTAAPQDHGLKGTFTEDDAEQSSPVWTAPNLEPNDQLKLALLPEVIPTPAFREPERKTSVPVRPSVLLEDVPSIYHEDDTSFASLNPPFREITADRSVTHRKDSYHSVYMVDSGNLKEDNDDLFNVENDGFIQSLDILQKQSIITAPELFSILSNRVEREKVLLIDLRIPQRSAINHIVAPNLVNVDPNLLWDKQTNTPIYKDDILEHLLKENENFINRNKFDYIVYYTDVKTFMTINFDYAFIFFYLMLTSQKTPLTTVPTTLLGGYEKWKKTLHSYAQEYHISIEDYLYRPYSQKARLQQEQQQQQQQPDSQDSFSAKESSTKVPEPPSWKPPDLPIRLRKRPPPPPPVSMPTTPEIPPPLPPKIMVHSQVSSISRKPPIPAKQHVKKEQLNSNEIIQRKRQHQHQHYDQQILQPQRAYNIPTIERSPNVYVSLSITGLRNLGNTCYINSMIQCLFAAKTFRTLFISSKYKSYLQPIRSNGSHYSPKLSNSLSMLFNKMYLNGGCSVVPTGFLKVINQLRPDLKIPDDQQDTQEFLMILLDRLHDELSDQQHVANDYPNLLLYNADALKVSNNEYKHWFDKNVIGNGISPIDDIFQGQMENSLQCKRCGYTTFNYSTFYVLSLAIPRRSMKLSKLGRSTEKRVKLEDCINMFTSDEVLSGENAWDCPRCGPTASVSTSVSALENEPSIVKSKKKKSRFFTLHTGTKRRHLDFFGDGITEGHNSNNNNTTIFERERSRSPFRMLGGSGKRSSSSTPFSTGGNDSNNSSDYKNKKLTTVKTINFVTLPKILVIHLSRFYYDLTKKNNTVVTYPLILNIILKNNDTMKYKLFGVVNHTGTLISGHYTSLVNKDLEHNVNIGRSKWYYFDDEVVKADRKHGSDKNLKISSSDVYVLFYERVYD

SEQ ID NO: 74 - protein, 359 aa, Saccharomyces cerevisiae
MQRLQWDKDILFLIFKVILIFCWFFFSFLSSEKLQFLQKNTSSYSIRTDCEELGGEHRNRQKIMDYFNIKQNYYTGNFVQCLQEIEKFSKVTDNTLLFYKAKTLLALGQYQSQDPTSKLGKVLDLYVQFLDTKNIEELENLLKDKQNSPYELYLLATAQAILGDLDKSLETCVEGIDNDEAEGTTELLLLAIEVALLNNNVSTASTIFDNYTNAIEDTVSGDNEMILNLAESYIKFATNKETATSNFYYYEELSQTFPTWKTQLGLLNLHLQQRNIAEAQGIVELLLSDYYSVEQKENAVLYKPTFLANQITLALMQGLDTEDLTNQLVKLDHEHAFIKHHQEIDAKFDELVRKYDTSN

SEQ ID NO: 75 - protein, 152 aa, Beta vulgaris
MTFTEKDEALVKESWDIMKQNIPEYSLRFFSIILEIAPAAKNMFSFLRDSEEVPQNNPKLKAHAIKVFKMTCESAIQLREKGEVVVGETTLKYLGAIHLKNGVIDPHFEVVKQALLRTIEEASGDKWSEELKCAWSVAYDHLAAAIKAEMKE

SEQ ID NO: 76 - protein, 212 aa, Glycine max
MQQHLMQMQPMMAAYYPNNVTTDHIQQYLDENKSLILKIVESQNSGKLSECAENQSRLQRNLMYLAAIADSQPQPSPLAGQYPSSGLVQQGAHYMQAQQAQQMSQQQLMASRSSLLYSQQPFSVLQQQQGMHSQLGMSSSGSQGLHMLQSEATNVGGNATIGTGGGFPDFVRIGSGKQDIGISGEGRGGNSSGHSGDGGETLNYLKAAGDGN

SEQ ID NO: 77 - protein, 329 aa, Arabidopsis thaliana
MVVVTKKTMKIQIHLLYSFLFLCFSTLTLSSEPRNPEVEALISIRNNLHDPHGALNNWDEFSVDPCSWAMITCSPDNLVIGLGAPSQSPSGGLSESIGNLTNLRQVSLQNNNISGKIPPELGFLPKLQTLDLSNNRFSGDIPVSIDQLSSLQYLRLNNNSLSGPFPASLSQIPHLSFLDLSYNNLSGPVPKFPARTFNVAGNPLICRSNPPEICSGSINASPLSVSLSSSSGRRSNRLAIALSVSLGSVVILVLALGSFCWYRKKQRRLLILNLNDKQEEGLQGLGNLRSFTFRELHVYTDGFSSKNILGAGGFGNVYRGKLEMGQWWQ

SEQ ID NO: 78 - protein, 158 aa, Arabidopsis thaliana
MGEIGFTEKQEALVKESWEILKQDIPKYSLHFFSQILEIAPAAKGLFSFLRDSDEVPHNNPKLKAHAVKVFKMTCETAIQLREEGKVVVADTTLQYLGSIHLKSGVIDPHFEVVKEALLRTLKEGLGEKYNEEVEGAWSQAYDHLALAIKTEMKQEES

SEQ ID NO: 79 - protein, 121 aa, Arabidopsis thaliana
MGRVFMVDLEGNIYICKLCKTHLSTDQDIMSKSFQCKNGRAYLFNNVVNVSVGEKEDRMMITGLHNVVDIFCVGCGSNVGWKYEFAHEKSQKYKEGKSVLELYKISGPHDSNDLVSDGDDA

SEQ ID NO: 80 - protein, 885 aa, Arabidopsis thaliana
MERHFVFIATYLLIFHLVQAQNQTGFISVDCGLSLLESPYDAPQTDLTYTSDADLVASGKTGRLAKEFEPLVDKPTLTLRYFPEGVRNCYNLNVTSDTNYLIKATFVYGNYDGLNVGPNFNLYLGPNLWTTVSSNDTIEEIILVTRSNSLQVCLVKTGISIPFINMLELRPMKKNMYVTQSGSLKYLFRGYISNSSTRIRFPDDVYDRKWYPLFDDSWTQVTTNLKVNTSITYELPQSVMAKAATPIKANDTLNITWTVEPPTTQFYSYVHIAEIQALRANETREFNVTLNGEYTFGPFSPIPLKTASIVDLSPGQCDGGRCILQVVKTLKSTLPPLLNAIEAFTVIDFPQMETNENDVAGIKNVQGTYGLSRISWQGDPCVPKQLLWDGLNCKNSDISTPPIITSLDLSSSGLTGIITQAIKNLTHLQILDLSDNNLTGEVPEFLADIKSLLVINLSGNNLSGSVPPSLLQKKGMKLNVEGNPHILCTTGSCVKKKEDGHKKKSVIVPVVASIASIAVLIGALVLFLILRKKRSPKVEGPPPSYMQASDGRLPRSSEPAIVTKNRRFSYSQVVIMTNNFQRILGKGGFGMVYHGFVNGTEQVAVKILSHSSSQGYKQFKAEVELLLRVHHKNLVGLVGYCDEGDNLALIYEYMANGDLKEHMSGTRNRFILNWGTRLKIVIESAQGLEYLHNGCKPPMVHRDVKTTNILLNEHFEAKLADFGLSRSFLIEGETHVSTVVAGTPGYLDPEYHRTNWLTEKSDVYSFGILLLEIITNRHVIDQSREKPHIGEWVGVMLTKGDIQSIMDPSLNEDYDSGSVWKAVELAMSCLNHSSARRPTMSQVVIELNECLASENARGGASRDMESKSSIEVSLTFGTEVSPNAR

SEQ ID NO: 81 - protein, 360 aa, Arabidopsis thaliana
MDYDRYKLFVGGIAKETSEEALKQYFSRYGAVLEAVVAKEKVTGKPRGFGFVRFANDCDVVKALRDTHFILGKPVDVRKAIRKHELYQQPFSMQFLERKVQQMNGGLREMSSNGVTSRTKKIFVGGLSSNTTEEEFKSYFERFGRTTDVVVMHDGVTNRPRGFGFVTYDSEDSVEVVMQSNFHELSDKRVEVKRAIPKEGIQSNNGNAVNIPPSYSSFQATPYVPEQNGYGMVLQFPPPVFGYHHNVQAVQYPYGYQFTAQVANVSWNNPIMQPTGFYCAPPHPTPPPTNNLGYIQYMNGFDLSGTNISGYNPLAWPVTGDAAGALIHQFVDLKLDVHSQAHQRMNGGNMGIPLQNGTYI

SEQ ID NO: 82 - protein, 385 aa, Arabidopsis thaliana
MTTTGSNSNHNHHESNNNNNNPSTRSWGTAVSGQSVSTSGSMGSPSSRSEQTITVVTSTSDTTFQRLNNLDIQGDDAGSQGASGVKKKKRGQRAAGPDMTGRGLRQFSMKVCEKVESKGRTTYNEVTDELVAEFALPNNDGTSPDQQQYDEKNIRRRVYDALNVLMAMDIISKDKKEIQWRGLPRTSLSDIEELKNERLSLRNRIEKKTAYSRELEEQYVGLQNLIQRNEHLYSSGNAPSGGVALPFILVQTRPHATVEVEISEDMQLVHFDFNSTPFELHDDNFVLKTMKFCDQPPQQPNGRNNSQLVCHNFTPENPNKGPSTGPTPQLDMYETHLQSQQHQQHSQLQIIPMPETNNVTSSADTAPVKSPSLPGIMNSSMKPEN

SEQ ID NO: 83 - protein, 227 aa, Arabidopsis thaliana; identical to SEQ ID NO: 52

SEQ ID NO: 84 - protein, 398 aa, Arabidopsis thaliana
MEQPKKVADRYLKREVLGQGTYGVVFKATDTKNGETVAIKKIRLGKEKEGVNVTALREIKLLKELKHPHIIELIDAFPHKENLHIVFEFMETDLEAVIRDRNLYLSPGDVKSYLQMILKGLEYCHGKWVLHRDMKPNNLLIGPNGQLKLADFGLARIFGSPGRKFTHQVFARWYRAPELLFGAKQYDGAVDVWAAGCIFAELLLRRPFLQGNSDIDQLSKIFAALGTPKADQWPDMICLPDYVEYQFVPAPSLRSLLPTVSEDALDLLSKMFTYDPKSRISIQQALKHRYFTSAPSPTDPLKLPRPVSKQDAKSSDSKLEAIKVLSPAHKFRRVMPDRGKSGNGFKDQSVDVMRQASHDGQAPMSLDFTILAERPPNRPTITSADRSHLKRKLDLEFL

SEQ ID NO: 85 - protein, 129 aa, Triticum aestivum
MAVMSRLKRLAAPALLVLLALAASAAVAAKTTQDGAEAAPGKDEESWTGWAKDKISEGLGLKHDADEEAARETVQHTASETGSQVSGKAADAKEAAKGTVGEKLGEVKDKVTGAAADGKDKTHRKDDLL

SEQ ID NO: 86 - protein, 489 aa, Saccharomyces cerevisiae
MTKSDLLFDKFNDKHGKFLVFFGTFVDTPKLGELRIREKTSVGVLNGIIRFVNRNSLDPVKDCLDHDSSLSPEDVTVVDIIGKDKTRNNSFYFPGFVDTHNHVSQYPNVGVFGNSTLLDWLEKYTFPIEAALANENIAREVYNKVISKTLSHGTTTVAYYNTIDLKSTKLLAQLSSLLGQRVLVGKVCMDTNGPEYYIEDTKTSFESTVKVVKYIRETICDPLVNPIVTPRFAPSCSRELMQQLSKLVKDENIHVQTHLSENKEEIQWVQDLFPECESYTDVYDKYGLLTEKTVLAHCIHLTDAEARVIKQRRCGISHCPISNSSLTSGECRVRWLLDQGIKVGLGTDVSAGHSCSILTTGRQAFAVSRHLAMRETDHAKLSVSECLFLATMGGAQVLRMDETLGTFDVGKQFDAQMIDTNAPGSNVDMFHWQLKEKDQMQEQEQEQGQDPYKNPPLLTNEDIIAKWFFNGDDRNTTKVWVAGQQVYQI

SEQ ID NO: 87 - protein, 374 aa, Saccharomyces cerevisiae
MRIQSLFVLFNVAIIAWSYPYEPLRVLQVGENEVMEVPESEKLNLRRRGVKFFDVTKHTSFLPFFNKEEEPTVPTYNYPPEISNKEVVDDSIKNIDKGSMHKNLAKFTSFYTRYYKSDHGFESAEWLAATIANITKDIPQDTLTIEHFDHKEWKQYSIIVRVTGSTTPEDIIIIGSHQDSINLLLPSIMAAPGADDNGSGTVTNMEALRLYTENFLKRGFRPNNTVEFHFYSAEEGGLLGSLDVFTAYAKQKKHVRAMLQQDMTGYVSDPEDEHVGIVTDYTTPALTDFIKLIINSYLSIPYRDTQCGYACSDHGSATRNGFPGSFVIESEFKKTNKYIHSTMDTLDRLSLAHMAEHTKIVLGVIIELGSWSAW

SEQ ID NO: 88 - protein, 225 aa, Saccharomyces cerevisiae
MRFSMLIGFNLLTALSSFCAAISANNSDNVEHEQEVAEAVAPPSINIEVKYDVVGKESENHDSFLEFYAEDTATLAYNVTNWEDTNITIFGVNGTIVTYPHGYPVADITGASIGPYEMEVNGTSKFGQDVTLNLPEGQYFLIPFLLASRFDEIVRIAAPPTLFEIVSPPISFFNPQFLSVQVIFLAIIGGVSYYYMKSKTNQRPSKKSATVKKVDESWLPETYKK

SEQ ID NO: 89 - protein, 495 aa, Saccharomyces cerevisiae
MKTDRLLINASPETCTKGDAEMDTMDTIDRMTSVKVLAEGKVLSNFEEPGLMRCGYHDAKNWVRRLSSETIVGEDTSNLYPFYVDTAYDVRRLRKDLINAKVDLQVENLIIICNINDISTVFLMREVVEWILRNFHSITVYVQDIFKKSTQFAVGDLCKDSNCSKNRVKYWSKEFVKKHDSFFDLMITLGGDGTVLFASSIFTKDVPPIVPFALGSLGFLTNFEFQNFKETLKHILTDEVRINLRMRLQCKLYRRNKPEIDAATGRKICYIDFISEHHVLNEVTIDRGPAPCLSLLELYGNDSLMTKVQGDGLIVATPTGSTAYSLSAGGSLISPSVNAIAVTPICPHTLSFRPIILPDSMELKVRVDMNSRGTSWVNFDGKDRVELKQGDYVVITASPYSVPTIESSASEFFESISKNLNWNDREEQKPFAHILSPKNQEKYRLDSSKNGNDTISNPLESSCISSDAQDEERKSVTETETEIVVERTRQAHFAI

SEQ ID NO: 90 - protein, 143 aa, Saccharomyces cerevisiae
METNFSFDSNLIVIIIITLFATRIIAKRFLSTPKMVSQETVAHVKDLIGQKEVFVAAKTYCPYCKATLSTLFQELNVPKSKALVLELDEMSNGSEIQDALEEISGQKTVPNVYINGKHIGGNSDLETLKKNGKLAEILKPVFQ

SEQ ID NO: 91 - protein, 569 aa, Saccharomyces cerevisiae
MKDLKLSNFKGKFISRTSHWGLTGKKLRYFITIASMTGFSLFGYDQGLMASLITGKQFNYEFPATKENGDHDRHATVVQGATTSCYELGCFAGSLFVMFCGERIGRKPLILMGSVITIIGAVISTCAFRGYWALGQFIIGRVVTGVGTGLNTSTIPVWQSEMSKAENRGLLVNLEGSTIAFGTMIAYWIDFGLSYTNSSVQWRFPVSMQIVFALFLLAFMIKLPESPRWLISQSRTEEARYLVGTLDDADPNDEEVITEVAMLHDAVNRTKHEKHSLSSLFSRGRSQNLQRALIAASTQFFQQFTGCNAAIYYSTVLFNKTIKLDYRLSMIIGGVFATIYALSTIGSFFLIEKLGRRKLFLLGATGQAVSFTITFACLVKENKENARGAAVGLFLFITFFGLSLLSLPWIYPPEIASMKVRASTNAFSTCTNWLCNFAVVMFTPIFIGQSGWGCYLFFAVMNYLYIPVIFFFYPETAGRSLEEIDIIFAKAYEDGTQPWRVANHLPKLSLQEVEDHANALGSYDDEMEKEDFGEDRVEDTYNQINGDNSSSSSNIKNEDTVNDKANFEG

SEQ ID NO: 92 - protein, 509 aa, Saccharomyces cerevisiae
MIALKPNAVRTFRQVQHCSFRICRYQSTKSNKCLTPLQEYDRLVKLGKLRDDTYQRGIISSLGDLYDSLVKYVPPVVKTPNAVDQVGGWLNGLKSVFSRGKPKNIGAYVDVSKIGNSIPRGVYLYGDVGCGKTMLMDLFYTTIPNHLTKKRIHFHQFMQYVHKRSHEIVREQNLKELGDAKGKEIDTVPFLAAEIANNSHVLCFDEFQVTDVADAMILRRLMTALLSDDYGVVLFATSNRHPDELYINGVQRQSFIPCIELIKHRTKVIFLNSPTDYRKIPRPVSSVYYFPSDTSIKYASKECKTRRETHIKEWYNYFAQASHTDDSTDSHTVHKTFYDYPLTIWGREFKVPKCTPPRVAQFTFKQLCGEPLAAGDYLTLAKNFEAFIVTDIPYLSIYVRDEVRRFITFLDAVYDSGGKLATTGAADFSSLFVEPEQILNDFELRPTTKEPDSVDTGMVDEMVEKHGFSKEIAKKSQMFALDEERFAFARALSRLSQMSSTDWVTKPTY

SEQ ID NO: 93 - protein, 148 aa, Saccharomyces cerevisiae
MCESSNKTENDIVRLSQAMDVLAKLIISKQKDGSQLQVEYEHKLKELEKFINLLLGLHESTVGSMMNTSVLDMVLRNGIEIMEKDDQKYALIPIKAKEEADKTTSTIQGVTSKKSSKKKKNKIKCSFCHEAGHTRAHCGARLTVIPKK

SEQ ID NO: 94 - protein, 111 aa, Saccharomyces cerevisiae
MKGSKSHLVFTLLQVSQLNVFLFFLGFLLPLFLGLFVSLRSLALALSSGWFIMDLILFRTFPEAELYPAVIGKPSGLGLTEAFEFISIFFPDVQQTERNIKYNWERCFNGE

SEQ ID NO: 95 - protein, 299 aa, Saccharomyces cerevisiae
MSTFSASDFNSERYSSSRPSYPSDFYKMIDEYHDGERKLLVDVGCGPGTATLQMAQELKPFEQIIGSDLSATMIKTAEVIKEGSPDTYKNVSFKISSSDDFKFLGADSVDKQKIDMITAVECAHWFDFEKFQRSAYANLRKDGTIAIWGYADPIFPDYPEFDDLMIEVPYGKQGLGPYWEQPGRSRLRNMLKDSHLDPELFHDIQVSYFCAEDVRDKVKLHQHTKKPLLIRKQVTLVEFADYVRTWSAYHQWKQDPKNKDKEDVADWFIKESLRRRPELSTNTKIEVVWNTFYKLGKRV

SEQ ID NO: 96 - protein, 116 aa, Saccharomyces cerevisiae
MHILFLFIFHCLAFKDLIFFKQYVPFAAAGGYPISFLFIKVLTASTNLLLSSSSGGSWNKLSKESQLLKVILTHFLVPIFFFLFQYIILSEDRQQERQPKFRDNAKFDGHAKTCHI

SEQ ID NO: 97 - protein, 593 aa, Saccharomyces cerevisiae
MYSIVKEIIVDPYKRLKWGFIPVKRQVEDLPDDLNSTEIVTISNSIQSHETAENFITTTSEKDQLHFETSSYSEHKDNVNVTRSYEYRDEADRPWWRFFDEQEYRINEKERSHNKWYSWFKQGTSFKEKKLLIKLDVLLAFYSCIAYWVKYLDTVNINNAYVSGMKEDLGFQGNDLVHTQVMYTVGNIIFQLPFLIYLNKLPLNYVLPSLDLCWSLLTVGAAYVNSVPHLKAIRFFIGAFEAPSYLAYQYLFGSFYKHDEMVRRSAFYYLGQYIGILSAGGIQSAVYSSLNGVNGLEGWRWNFIIDAIVSVVVGLIGFYSLPGDPYNCYSIFLTDDEIRLARKRLKENQTGKSDFETKVFDIKLWKTIFSDWKIYILTLWNIFCWNDSNVSSGAYLLWLKSLKRYSIPKLNQLSMITPGLGMVYLMLTGIIADKLHSRWFAIIFTQVFNIIGNSILAAWDVAEGAKWFAFMLQCFGWAMAPVLYSWQNDICRRDAQTRAITLVTMNIMAQSSTAWISVLVWKTEEAPRYLKGFTFTACSAFCLSIWTFVVLYFYKRDERNNAKKNGIVLYNSKHGVEKPTSKDVETLSVSDEK

SEQ ID NO: 98 - protein, 142 aa, Saccharomyces cerevisiae
MDMVSPVLNLQSSILGELVGIIGKVFFLLIEEIKYPIITPKIIVDAQISSWSLFFFASICNLSAKFREPIVTTSSIISLMESEKDLKNVNEYFQIMAKMLFILENKIVVSLFVVFNISVLIIVKSEPYSYGKVLFKPSSSIF

SEQ ID NO: 99 - protein, 642 aa, Saccharomyces cerevisiae
MSSQFFLKTSQDIELFQSYPTFEQSNTNSKDFPVISSVLSPCGRFLALSTKENVKVFTGPCLDNVLLTMKLSDVYDLHFSPAGNYLSTWERASIQDPNHKNVKVWYLNKPFKKDCVSEDIVPAYEYQAKSQSGWFLQFSKLDNYGLRLFKHDLKIVKLSSANADNFDFQSPFAVLSDDETSQHFTTYLISPAEHPTICTFTPEKGGKPAQLIIWALSEGKITKKIASKTFFKADSCQLKWNPLGNAILCLAITDFDSSNKSYYGENTLYLLSFQGVNGTLGGNSVRVSLTTGPVHDFTWSPTSRQFGVIAGYMPATISFFDLRGNVVHSLPQQAKNTMLFSPSGHYILIAGFGNLQGSVEILDRLDKFKCVSKFDATNTSVCKWSPGGEFIMTATTSPRLRVDNGVKIWHVSGSLVFVKEFKELLKVDWRSPCNYKTLENKDEAFFENHIINNWEPLPDSTTSSLDPKISNKSELQIHSSVQEYISQHPSREASSNGNGSKAKAGGAYKPPHARRTGGGRIVPGVPPGAAKKTIPGLVPGMSANKDANTKNRRRRANKKSSETSPDSTPAPSAPASTNAPTNNKETSPEEKKIRSLLKKLRAIETLKERQAVGDKLEDTQVLKIQTEEKVLKDLEKLGWKDE

SEQ ID NO: 100 - protein, 122 aa, Saccharomyces cerevisiae
MASTVAGLSMSAESLRLPLLIGVSSGMLSVSDAEVLPSFLFKSGFSVLQSAALDTDDDLARGLSLLDLLPLVLLSPFFEEDVDEEEAGDVEGLDGFVFVFRLLLPLYNQSTGTSNSVLVIIT

SEQ ID NO: 101 - protein, 646 aa, Saccharomyces cerevisiae
MKESKKMAKDNLTNLLSQLNIQLSQDEHSQVEQTCVKLLDSGCENPADVFRRCLVAVIQQDKYQKALHYLKKFKHIDDKYGRKFALEKLYIFYKLNMPDEFNTLYTAIITDDLDTVLKKDIESLRGILHVRAQYCYKNGLYQEAFKIYQHLASHNEKDQDSQIELSCNERVPLSVATELMNRSPLVTPMDESSYDLLFNESFIMASVGKYDKAIELLEKALQGATNEGYQNDINTIKLQLSFVLQMVGKTAQSKEILKGLLQELKADSPFSLICQNNLNAFVDFSKYNTNFNLLLRELNVEKLNTFNLQTFTHEQWSNIQRNVLFLRLFNNVKIHSQESLLSRTFDKYSKLVDNVTLESYKTQAKKLYHHTTKTILSGTDGSTIGILLLTIQLLIIEKEWENAIRIGELFLNESWKSSFEKFNDSQAIVCYILFELYKIKGRNNSKSVLLKKLGSVRVQLSGKIQENIPFWKHVGFELLSMGNAKESKALLREISNFSKGDADVLVDRVVSSDSLDIAQGIDLVRDIDIDKLIQLGVKPLESSAKRSKNTAVSKVQKRKVLELKKKRKIKRLEKFLQGRDTSKLPDPERWLPLRDRSTYRPKKKQQGAKQTQGGAMNKKSEQALDISKKGKPTVNKKPKNKKKGRK

SEQ ID NO: 102 - protein, 328 aa, Saccharomyces cerevisiae
MEKKHVTVQIQSAPPSYIKLEANEKFVYITSTMNGLSYQIAAIVSYPEKRNSSTANKEDGKLLCKENKLALLLHGSQSHKNAIYQTLLAKRLAEFGYWVLRIDFRGQGDSSDNCDPGLGRTLAQDLEDLSTVYQTVSDRSLRVQLYKTSTISLDVVVAHSRGSLAMFKFCLKLHAAESPLPSHLINCAGRYDGRGLIERCTRLHPHWQAEGGFWANGPRNGEYKDFWIPLSETYSIAGVCVPEFATIPQTCSVMSCYGMCDHIVPISAASNYARLFEGRHSLKLIENADHNYYGIEGDPNALGLPIRRGRVNYSPLVVDLIMEYLQDT

SEQ ID NO: 103 - protein, 380 aa, Saccharomyces cerevisiae
MDGAKFENTVAFLPSEIFDCYNSTLPKNVFRSFVTWSCYEKFNSLEFRTWLLMWLPLIIAWKIRGKRHYLVIVTALMFEVLYFLWTYSYIFRERTLGKQVSQFAKEIITNTPGIDTEDWERVAVNFNSYLYENKLWNTEYFFFDGSSCQEAFRKMLLEPFSLKKNDFANAKVPDGSVCYTEKALQVYFTQIERKWHWINSEGFLHNKTTQSVQFSKHGYGSKLLWAFKEVTIMNSRFAFFSIAYLNGLLTIPRLRNSLHILYVCAVLSSMIIEYLIGIDKFRFKSMNLIHKLQFLSYITCGHEKSDATNWSQIAKRTNTYMFEQKIWNSPILFSDGIDCEKFFKWYFSTPVSSQASLSVGSTDFELWPYIKEAQSACNDV

SEQ ID NO: 104 - protein, 567 aa, Saccharomyces cerevisiae
MTGDGSAHISKNNQNQHKDRFKFIVNDKSILGPQWLSLYQTDGKVTFAKSHFEQAMMNVIREPNINSTVILRADILKEINHAAEAGSEPKFDESVLKKFEIDNGNESGEEDVKKINIEDLNIRSCETSESLKLSPVHEFVRRIIPRNFYKDAIINQTCLILNSKDPNFQETSLIVYTPHINSEKDCPFYIPRTQSVGILLHQSVLSVHYIPFPEDKTAFTDESERVVRTAYRLLQTANKHSKGVMQGYEKRVNHDQVVNKVNFQNTYIVLKKKYSKFLVENWAESTDPKKHVFEDIAIAAFLIELWIKVYGPDFRSKMQFRDLGCGNGALCYILLSESIKGLGIDARKRKSWSIYPPEVQSSLKEQVIIPSILLRPHPALKRQVPHLEHNGRFFPVKVTHEVIAPATVVYSSEDLLKSPQVNTAEFPPDTFIIGNHSDELTCWIPLLGHPYMVIPCCSHNFSGQRVRFNVRKRSPRSNEIKNQNNSKSTYSGLVDHVEYISSRVGWKVEKEMLRIPSTRNAAIIGVENATLKHFPTQAVYDMIWEDGGAEGWIQNTMSLLKRNPRNH

SEQ ID NO: 105 - protein, 387 aa, Saccharomyces cerevisiae
MEQNRFKKETKTCSASWPRAPQSTLCATDRLELTYDVYTSAERQRRSRTATRLNLVFLHGSGMSKVVWEYYLPRLVAADAEGNYAIDKVLLIDQVNHGDSAVRNRGRLGTNFNWIDGARDVLKIATCELGSIDSHPALNVVIGHSMGGFQALACDVLQPNLFHLLILIEPVVITRKAIGAGRPGLPPDSPQIPENLYNSLRLKTCDHFANESEYVKYMRNGSFFTNAHSQILQNIIDFERTKASGDDEDGGPVRTKMEQAQNLLCYMNMQTFAPFLISNVKFVRKRTIHIVGARSNWCPPQNQLFLQKTLQNYHLDVIPGGSHLVNVEAPDLVIERINHHIHEFVLTSPLQSSHIPQLTLEERAVMFDRAFDSFKNEALVKTTKQKL

SEQ ID NO: 106 - protein, 526 aa, Saccharomyces cerevisiae
MSTLFLIGIHEIEKSQTIVQNEHYFDRVIELQDLDSLMVALYKDRVSPFPNVHNFETGVSIVLYDPSKFQLSVRQLDVLFKRFFPSFNISAIDHTREENLQRLECVERENSICRNRITRINHWMYHHHDDTPDGINKNSYGTVNGNSVPTQACEANIYTLLLHLNDSKAQHLRKASVPRLIRNIEFMSFLSDPIEKISQEGSHYWNILSTWDFCALSLSTQELIWCGFTLIKKLSKDAKVLIADNKLLLLLFTLESSYHQVNKFHNFRHAIDVMQATWRLCTYLLKDNPVQTLLLCMAAIGHDVGHPGTNNQLLCNCESEVAQNFKNVSILENFHRELFQQLLSEHWPQLLSISKKKFDFISEAILATDMALHSQYEDRLMHENPMKQITLISLIIKAADISNVTRTLSISARWAYLITLEFNDCALLETFHKAHRPEQDCFGDSYKNVDSPKEDLESIQNILVNVTDPDDIIKDHPHIPNGQIFFINTFAEVFFNALSQKFSGLKFLSDNVKINKEYWMKHKKPQ

SEQ ID NO: 107 - protein, 578 aa, Saccharomyces cerevisiae
MSIQAFVFCGKGSNLAPFTQPDFPFQTQNKDSTAATSGDKLNELVNSALDSTVINEFMQHSTRLPKALLPIGNRPMIEYVLDWCDQADFKEISVVAPVDEIELIESGLTSFLSLRKQQFELIYKALSNSNHSHHLQDPKKINFIPSKANSTGESLQKELLPRINGDFVILPCDFVTDIPPQVLVDQFRNRDDNNLAMTIYYKNSLDSSIDKKQQQKQKQQQFFTVYSENEDSERQPILLDVYSQRDVTKTKYLQIRSHLLWNYPNLTVSTKLLNSFIYFCSFELCQLLKLGPQSMSRQASFKDPFTGNQQQQNPPTTDDDEDRNHDDDDDYKPSATSIQPTYFKKKNDLILDPINCNKSLSKVFRDLSRRSWQHSKPREPIGIFILPNETLFIRANNLNAYMDANRFVLKIKSQTMFTKNIQIQSAAIGADAIVDPKCQISAHSNVKMSVLGTQANIGSRCRVAGSLLFPGVHLGDEVILENCIIGPMAKIGSKCKLSNCYIEGHYVVEPKNNFKGETLANVYLDEDEEDELIYDDSVIAGESEIAEETDSDDRSDEDSDDSEYTDEYEYEDDGLFER

SEQ ID NO: 108 - protein, 612 aa, Saccharomyces cerevisiae
MAEMKNSTAASSRWTKSRLSHFFPSYTNSSGMGAASTDQSSTQGEELHHRKHCEEDNDGQKPKKSPVSTSTMQIKSRQDEDEDDGRIVIKPVNDEDDTSVIITFNQSISPFIITLTFVASISGFMFGYDTGYISSALISINRDLDNKVLTYGEKELITAATSLGALITSVGAGTAADVFGRRPCLMFSNLMFLIGAILQITAHKFWQMAAGRLIMGFGVGIGSLISPLFISEIAPKMIRGRLTVINSLWLTGGQLIAYGCGAGLNHVKNGWRILVGLSLIPTVLQFSFFCFLPDTPRYYVMKGDLKRAKMVLKRSYVNTEDEIIDQKVEELSSLNQSIPGKNPITKFWNMVKELHTVPSNFRALIIGCGLQAIQQFTGWNSLMYFSGTIFETVGFKNSSAVSIIVSGTNFVFTLIAFFCIDKIGRRYILLIGLPGMTVALVICAIAFHFLGIKFNGADAVVASDGFSSWGIVIIVFIIVYAAFYALGIGTVPWQQSELFPQNVRGVGTSYATATNWAGSLVIASTFLTMLQNITPTGTFSFFAGVACLSTIFCYFCYPELSGLELEEVQTILKDGFNIKASKALAKKRKQQVAEGAAHHKLKFEPTQEIVES

SEQ ID NO: 109 - protein, 661 aa, Saccharomyces cerevisiae
MGTLFRRNVQNQKSDSDENNKGGSVHNKRESRNHIHHQQGLGHKRRRGISGSAKRNERGKDFDRKRDGNGRKRWRDSRRLIFILGAFLGVLLPFSFGAYHVHNSDSDLFDNFVNFDSLKVYLDDWKDVLPQGISSFIDDIQAGNYSTSSLDDLSENFAVGKQLLRDYNIEAKHPVVMVPGVISTGIESWGVIGDDECDSSAHFRKRLWGSFYMLRTMVMDKVCWLKHVMLDPETGLDPPNFTLRAAQGFESTDYFIAGYWIWNKVFQNLGVIGYEPNKMTSAAYDWRLAYLDLERRDRYFTKLKEQIELFHQLSGEKVCLIGHSMGSQIIFYFMKWVEAEGPLYGNGGRGWVNEHIDSFINAAGTLLGAPKAVPALISGEMKDTIQLNTLAMYGLEKFFSRIERVKMLQTWGGIPSMLPKGEEVIWGDMKSSSEDALNNNTDTYGNFIRFERNTSDAFNKNLTMKDAINMTLSISPEWLQRRVHEQYSFGYSKNEEELRKNELHHKHWSNPMEVPLPEAPHMKIYCIYGVNNPTERAYVYKEEDDSSALNLTIDYESKQPVFLTEGDGTVPLVAHSMCHKWAQGASPYNPAGINVTIVEMKHQPDRFDIRGGAKSAEHVDILGSAELNDYILKIASGNGDLVEPRQLSNLSQWVSQMPFPM

SEQ ID NO: 110 - protein, 93 aa, Saccharomyces cerevisiae
MVTPREPKKRTTRKKKDPNAPKRALSAYMFFANENRDIVRSENPDITFGQVGKKLGEKWKALTPEEKQPYEAKAQADKKRYESEKELYNATLA

SEQ ID NO: 111 - protein, 474 aa, Saccharomyces cerevisiae
MEVTSMFLNRMMKTRTGLYRLYSTLKVPHVEINGIKYKTDPQTTNVTDSIIKLTDRSLHLKESHPVGILRDLIEKKLNSVDNTFKIFNNFKPVVTTMENFDSLGFPKDHPGRSKSDTYYINETHLLRTHTSAHELECFQKIRNDSDNIKSGFLISADVYRRDEIDKTHYPVFHQMEGATIWKRTKADVGVKEPMYIEKIREDIRQVENLLNKENVKITVDDDTIPLKENNPKQEYMSDLEVDLCSQHLKRSIELIVSEVFNKKISSMIKNKANNTPKELKVRWINAYFPWTAPSWEIEVWWQGEWLELCGCGLIRQDVLLRAGYKPSETIGWAFGLGLDRIAMLLFEIPDIRLLWSRDERFSRQFSKGLITSFKPYSKHPGSFRDVAFWLPEDKPDIHQVHENDLMEIIRNIAGDLVESVKLVDSFTHPKTGRKSMCYRINYQSMDRNLTNAEVNTLQDMVCSKLVKEYSVELR

SEQ ID NO: 112 - protein, 177 aa, Saccharomyces cerevisiae
MKLAQDMNVDEIFLKQAAEAIAVISSSPTHTDPIIRELLHRIRQSSPLSAVIPAPENVLKAGEPENMARGLIRIPETQTKRTGGNNHSKEGAQLYSCAKCQLKFSRSSDLRRHEKVHSLVLPHICSNCGKGFARKDALKRHSNTLTCQRNRKKLSEGSDVDVDELIKDAIKNGTGLL

SEQ ID NO: 113 - protein, 206 aa, Saccharomyces cerevisiae
MMPYNTPPNIQEPMNFASSNPFGIIPDALSFQNFKYDRLQQQQQQQQQQQQNRTASSLQQPQQQQPISPPLFLVGAGTSENSNLNKNANTSTIPPLLFSRSSQHYVVPDIDHSSIIYKNNICKSFKDDLFFCPRSLLSLEEQQACEKMDRLTAEQMSLYHQNTQSSSNPGSMSSSPPNSASSIFNSRPKFNPYTSQSFNPLESVQE

SEQ ID NO: 114 - protein, 209 aa, Saccharomyces cerevisiae
MISPSKKRTILSSKNINQKPRAVVKGNELRSPSKRRSQIDTDYALRRSPIKTIQISKAAQFMLYEETAEERNIAVHRHNEIYNNNNSVSNENNPSQVKENLSPAKICPYERAFLREGGRIALKDLSVDEFKGYIQDPLTDETIPLTLPLGDKKISLPSFITPPRNSKISIFFTSKHQGQNPETKISRSTDDVSEKKVVRKLSFHVYEDE

SEQ ID NO: 115 - protein, 740 aa, Saccharomyces cerevisiae
MDRGRWCFLVSVSSRIMNLQELLAKVPLLLSYPTIILSSNLIVPSHNDLISRAASTSAAEYADEKLIFFSTDHAIRLIFLPTFVASSFNLFAHYFNFINYSSRRKYYVLFTAIYFLSILTAIFHPIQSTCITLLIIKLLTTADESSPKIALNFKTILKTFVPFITLTLVILRWDPSFDASSGDVNKISTSLAAYALLILTLRYASPLILSTLSSSIGVVSKDTSVAQHSISRNKRFPLILVLPIFSFVLLYLMTIVNKTYNIQLLMVFVFFGCLSIFFLSLKDLFTEDGNQKKGGQEDEYCRMFDIKYMISYLWLTRFTILLTGIMAIVVHFLSFNEITSSIKTDLLSLLFVVVAEYVSSFSNKQPDSHSHNHAHHHSHLTDSLPLENESMFKQMALNKDTRSIFSFLLLNTAFMFVQLLYSFRSKSLGLLSDSLHMALDCTSLLLGLIAGVLTKKPASDKFPFGLNYLGTLAGFTNGVLLLGIVCGIFVEAIERIFNPIHLHATNELLVVATLGLLVNLVGLFAFDHGAHDHGGTDNENMKGIFLHILADTLGSVGVVISTLLIKLTHWPIFDPIASLLIGSLILLSALPLLKSTSANILLRLDDKKHNLVKSALNQISTTPGITGYTTPRFWPTESGSSGHSHAHTHSHAENHSHEHHHDQKNGSQEHPSLVGYIHVQYVDGENSTIIKKRVEKIFENVSIKAWVQVEPQNSTCWCRATSMNTISANPNSLPLQPIAN

SEQ ID NO: 116 - protein, 1037 aa, Saccharomyces cerevisiae
MACLSRIDANLLQYYEKPEPNNTVDLYVSNNSNNNGLKEGDKSISTPVPQPYGSEYSNCLLLSNSEYICYHFSSRSTLLTFYPLSDAYHGKTINIHLPNASMNQRYTLTIQEVEQQLLVNVILKDGSFLTLQLPLSFLFSSANTLNGEWFHLQNPYDFTVRVPHFLFYVSPQFSVVFLEDGGLLGLKKVDGVHYEPLLFNDNSYLKSLTRFFSRSSKSDYDSVISCKLFHERYLIVLTQNCHLKIWDLTSFTLIQDYDMVSQSDSDPSHFRKVEAVGEYLSLYNNTLVTLLPLENGLFQMGTLLVDSSGILTYTFQNNIPTNLSASAIWSIVDLVLTRPLELNVEASYLNLIVLWKSGTASKLQILNVNDESFKNYEWIESVNKSLVDLQSEHDLDIVTKTGDVERGFCNLKSRYGTQIFERAQQILSENKIIMAHNEDEEYLANLETILRDVKTAFNEASSITLYGDEIILVNCFQPYNHSLYKLNTTVENWFYNMHSETDGSELFKYLRTLNGFASTLSNDVLRSISKKFLDIITGELPDSMTTVEKFTDIFKNCLENQFEITNLKILFDELNSFDIPVVLNDLINNQMKPGIFWKKDFISAIKFDGFTSIISLESLHQLLSIHYRITLQVLLTFVLFDLDTEIFGQHISTLLDLHYKQFLLLNLYRQDKCLLAEVLLKDSSEFSFGVKFFNYGQLIAYIDSLNSNVYNASITENSFFMTFFRSYIIENTSHKNIRFFLENVECPFYLRHNEVQEFMFAMTLFSCGNFDQSYEIFQLHDYPEAINDKLPTFLEDLKSENYHGDSIWKDLLCTFTVPYRHSAFYYQLSLLFDRNNSQEFALKCISKSAEYSLKEIQIEELQDFKEKQHIHYLNLLIHFRMFEEVLDVLRLGHECLSDTVRTNFLQLLLQEDIYSRDFFSTLLRLCNAHSDNGELYLRTVDIKIVDSILSQNLRSGDWECFKKLYCFRMLNKSERAAAEVLYQYILMQADLDVIRKRKCYLMVINVLSSFDSAYDQWILNGSKVVTLTDLRDELRGL

SEQ ID NO: 117 - protein, 242 aa, Saccharomyces cerevisiae
MIKNYLGRRWLNNPAIQAYVKQNAAVAHSTVFQGNLYEYTVMRELSEKLRMTKLRKTGGAHDGGVDIKGSWPVDDIYWKISSLMPNLEMASNIKRTNSQNGFVLKPLKYRIIDHTFEPLKVLVQCKAFTKSKLSPREFRELVGTFTSLVSHSQRNKTVCIMCSPHMLTKDTLNLINNITLPLIYLRVEMLKEKTDGHFDLINSGKLINYYENSYASTLMQDCKISEWLKLKLYKNSDFNSEK

SEQ ID NO: 118 - protein, 108 aa, Saccharomyces cerevisiae
MRYTATFRPLQRFVMNPFASLEGQDNISSVFFLHMQQFESQVKDRFRFPIFRLERKTFGNSCYQVETLKVKCRPRHAKSCNLLTLLFKSRTQSVLVPNFGFLILNSEP

SEQ ID NO: 119 - protein, 468 aa, Saccharomyces cerevisiae
MNFVTCHVQMRLLLQRRLVRLRESELFRPQTSLSTFKRHASQKTRPIQKCSRKYARILLLSVLVPYTGYAFYVSLATVKQIDLRNEMCQRLEENNNEVTYKGSLLKYSPLEVLGRFENPFEEYRIQTVFEFFANRVFELFERNRGGIPRDVHQMNKLMPVHKPTWGPNLVDVDPAEETALPLECKVLDELHIPTAVEENEGSKCPVYNTWLGQSCNYTVYNGLRILTDPLFSDFLIHKTLGPKRITQMPSQITEVPKPDIILVSHNHPDHLDLESLEYWSGKDSPLWIVPKGMKSYMTSNGCDNVLELSWWETLQVKKNNEIYHISATPAMHWSGRSLLDTNKSLWCSFLLTHHGNPILFHAGDTGYVKDLFVRIKERFGKGCKLALLPCGQYCPEWHQKPRHINPQEVLKIMKDLEARNVLGVHWGTFVLSGEYFLEPKEKLEMLAEWGGFKDRCYCPELGKTECFD

SEQ ID NO: 120 - protein, 423 aa, Saccharomyces cerevisiae
MDSRVALVRKYIAPSVIKSDSIQLHGLVKAPLFKALNSRYKLGSLQIVQDVDWNAKTTPSDSPEPLAATLNSNRSLPMTKFPKQEILEQVKLDTKVGKWRKFMTGWFRIGLYLLKSYKTGIQNTLKVFWDTRNEEQKFSIKNGALANLVREIEMHEINTRLSSSSLPTSSSAKAPLRPLSINRKTLVELIRRDQIWKLPVFFTLVFIFEEVSVLIFTFFPRVCPYNCLTPGGYKKLSNSYIKGTTSTQGNYGLGPLEFTKQGTIKYEPPYAVPIENLYNFLTSFPQSMISNWKLYIYKKLKLQKLLCNEIEKIYQYLFIDDWLLLQSILNTDVEKTKIALSDRELVNCILERKLYHMGDDLNEMVNDTLGKEILLKRLFLYWTLRYNDTISLNGKHTFSEKWGVNNISLLKYNSELVATKDIQ

SEQ ID NO: 121 - protein, 382 aa, Saccharomyces cerevisiae
MASNQHIGASNLNENEAILTNRVAELERRMSMFEGIFHALSNRLDLHFKKYDVVVNSQQQQINELTAFLSTLLNDQQRHAEILSEKLSGTLHGVSATSISLSQTLDPQGFTDGTTAPGAPRNYTSVPMNNDQTAHPQNEGAVSNETLFEDILNGNSQENDKSQQQTNSSNSISQENNSTNPSVDTRFNKPQNYNSNLVPSLEEYSANPPNNDGGQSQGLYISSNSSQSRQSPNLQKVSPNHENAVESNAQESVPTFEEEQYETKTGLKRKRIVCTRPFEFIKSPHSVMEVWKEYTEGVNGQPSIRKMEALYQTAWRRDPAVNKRYSRRKVLWKAIQTGLNRGYSLNYVVEILENSRYVNDKQKVKQPIGWLCHSSHIPETLK

SEQ ID NO: 122 - protein, 587 aa, Saccharomyces cerevisiae
MANRLLIYGLILWVSIIGSFALDRNKTAQNAKIGLHDTTVITTGSTTNVQKEHSSPLSTGSLRTHDFRQASKVDIRQADIRENGERKEQDALTQPATPRNPGDSSNSFLSFDEWKKVKSKEHSSGPERHLSRVREPVDPSCYKEKECIGEELEIDLGFLTNKNEWSEREENQKGFNEEKDIEKVYKKKFNYASLDCAATIVKSNPEAIGATSTLIESKDKYLLNPCSAPQQFIVIELCEDILVEEIEIANYEFFSSTFKRFRVSVSDRIPMVKNEWTILGEFEARNSRELQKFQIHNPQIWASYLKIEILSHYEDEFYCPISLIKVYGKSMMDEFKIDQLKAQEDKEQSIGTNNINNLNEQNIQDRCNNIETRLETPNTSNLSDLAGALSCTSKLIPLKFDEFFKVLNASFCPSKQMISSSSSSAVPVIPEESIFKNIMKRLSQLETNSSLTVSYIEEQSKLLSKSFEQLEMAHEAKFSHLVTIFNETMMSNLDLLNNFANQLKDQSLRILEEQKLENDKFTNRHLLHLERLEKEVSFQRRIVYASFFAFVGLISYLLITRELYFEDFEESKNGAIEKADIVQQAIR

SEQ ID NO: 123 - protein, 106 aa, Saccharomyces cerevisiae
MSTLLKSAKSIVPLMDRVLVQRIKAQAKTASGLYLPEKNVEKLNQAEVVAVGPGFTDANGNKVVPQVKVGDQVLIPQFGGSTIKLGNDDEVILFRDAEILAKIAKD

SEQ ID NO: 124 - protein, 534 aa, Saccharomyces cerevisiae
MSSDEEDFNDIYGDDKPTTTEEVKKEEEQNKAGSGTSQLDQLAALQALSSSLNKLNNPNSNNSSSNNSNQDTSSSKQDGTANDKEGSNEDTKNEKKQESATSANANANASSAGPSGLPWEQLQQTMSQFQQPSSQSPPQQQVTQTKEERSKADLSKESCKMFIGGLNWDTTEDNLREYFGKYGTVTDLKIMKDPATGRSRGFGFLSFEKPSSVDEVVKTQHILDGKVIDPKRAIPRDEQDKTGKIFVGGIGPDVRPKEFEEFFSQWGTIIDAQLMLDKDTGQSRGFGFVTYDSADAVDRVCQNKFIDFKDRKIEIKRAEPRHMQQKSSNNGGNNGGNNMNRRGGNFGNQGDFNQMYQNPMMGGYNPMMNPQAMTDYYQKMQEYYQQMQKQTGMDYTQMYQQQMQQMAMMMPGFAMPPNAMTLNQPQQDSNATQGSPAPSDSDNNKSNDVQTIGNTSNTDSGSPPLNLPNGPKGPSQYNDDHNSGYGYNRDRGDRDRNDRDRDYNHRSGGNHRRNGRGGRGGYNRRNNGYHPYNR

SEQ ID NO: 125 - protein, 102 aa, Saccharomyces cerevisiae
MSFRKKKLKPPAGSQFIINDSIMSYIDRTKTLIRMIGCKNQYIKARMKDKTFFYTKQFRTAKNKFFFHLYHWEATHINVDHYICTCHPIFWGSIGQKLRRSA

SEQ ID NO: 126 - protein, 486 aa, Saccharomyces cerevisiae
MSHTLKSKTLQELDIEEIKETNPLLKLVQGQRIVQVPELVLESGVVINNFPIAYKTWGTLNEAGDNVLVICHALTGSADVADWWGPLLGNDLAFDPSRFFIICLNSMGSPYGSFSPLTINEETGVRYGPEFPLCTVRDDVRAHRIVLDSLGVKSIACVIGGSMGGMLSLEWAAMYGKEYVKNMVALATSARHSAWCISWSEAQRQSIYSDPNYLDGYYPVEEQPVAGLSAARMSALLTYRTRNSFENKFSRRSPSIAQQQKAQREETRKPSTVSEHSLQIHNDGYKTKASTAIAGISGQKGQSVVSTASSSDSLNSSTSMTSVSSVTGEVKDIKPAQTYFSAQSYLRYQGTKFINRFDANCYIAITRKLDTHDLARDRVDDITEVLSTIQQPSLIIGIQSDGLFTYSEQEFLAEHIPKSQLEKIESPEGHDAFLLEFKLINKLIVQFLKTNCKAITDAAPRAWGGDVGNDETKTSVFGEAEEVTNW

SEQ ID NO: 127 - protein, 224 aa, Saccharomyces cerevisiae
MKILTQDEIEAHRSHTLKGGIEGALAGFAISAIIFKVLPRRYPKFKPSTLTWSIKTALWITPPTVLTAICAEEASNNFDATMYGSGSSSEDALDEHRRWKSLSTKDKFVEGLSNNKYKIITGAWAASLYGSWVIVNKDPIMTKAQKIVQARMYAQFITVGLLLASVGLSMYENKLHPNKQKVNEMRRWENALRVAEEEERLEKEGRRTGYVSNEERINSKIFKS

SEQ ID NO: 128 - protein, 429 aa, Saccharomyces cerevisiae
MSALRNIKFNEEEDGELPCLVTGEENNLQEILENVSYDGGNIVSDAKVERVNKQVENTSAGATDVHEKKRIPVSIITGYLGSGKSTLLEKIALKGADKKIAVILNEFGDSSEIEKAMTIKNGSNSYQEWLDLGNGCLCCSLKNIGVKAIEDMVERSPGKIDYILLETSGIADPAPIAKMFWQDEGLNSSVYIDGIITVLDCEHILKCLDDISIDAHWHGDKVGLEGNLTIAHFQLAMADRIIMNKYDTIEHSPEMVKQLKERVREINSIAPMFFTKYSDTPIQNLLDIHAYDSVRISDILDSGSGNGTIHDDRMGTIMLTFRPLKNEEEYNNKFIKQFLQPLLWKNFGAMTVLGGRRRDDGRDWEVQRTKGLILIEGENPIARVIQGVRDTYDVFPGKYDGSNKECKIVLIGKYLEKESIEELLRKTLE

SEQ ID NO: 129 - protein, 222 aa, Saccharomyces cerevisiae
MTVVIGVLALQGAFIEHVRHVEKCIVENRDFYEKKLSVMTVKDKNQLAQCDALIIPGGESTAMSLIAERTGFYDDLYAFVHNPSKVTWGTCAGMIYISQQLSNEEKLVKTLNLLKVKVKRNAFGRQAQSSTRICDFSNFIPHCNDFPATFIRAPVIEEVLDPEHVQVLYKLDGKDNGGQELIVAAKQKNNILATSFHPELAENDIRFHDWFIREFVLKNYSK

SEQ ID NO: 130 - protein, 108 aa, Saccharomyces cerevisiae
MSIENLKSFDPFADTGDDETATSNYIHIRIQQRNGRKTLTTVQGVPEEYDLKRILKVLKKDFACNGNIVKDPEMGEIIQLQGDQRAKVCEFMISQLGLQKKNIKIHGF

SEQ ID NO: 131 - protein, 118 aa, Saccharomyces cerevisiae
MKLPQTMLRSISVKHVRWPRILTGSKLWYSTQMAMTPEEKMITDKLQQELEPEVCKVQDVSGGCGSMFAINITSKKFNGLSLIKQHQLVNRILRDDISRWHGLQLTTKKSTGKGPASS

SEQ ID NO: 132 - protein, 195 aa, Saccharomyces cerevisiae
MSGSLKSLDKKIAKRRQVYKPVLDNPFTNEAHMWPRVHDQPLIWQLLQSSIINKLIHIQSKENYPWELYTDFNEIVQYLSGAHGNSDPVCLFVCNKDPDVPLVLLQQIPLLCYMAPMTVKLVQLPKSAMDTFKSVSKYGMLLLRCDDRVDKKFVSQIQKNVDLLQFPWLNAIKYRPTSVKLLKTTVPIVSKKRQK

SEQ ID NO: 133 - protein, 501 aa, Saccharomyces cerevisiae
MLLQGMRLSQRLHKRHLFASKILTWTTNPAHIRHLHDIRPPASNFNTQESAPIPESPANSPTRPQMAPKPNLKKKNRSLMYSIIGVSIVGLYFWFKSNSRKQKLPLSAQKVWKEAIWQESDKMDFNYKEALRRYIEALDECDRSHVDLLSDDYTRIELKIAEMYEKLNMLEEAQNLYQELLSRFFEALNVPGKVDESERGEVLRKDLRILIKSLEINKDIESGKRKLLQHLLLAQEEILSKSPELKEFFENRKKKLSMVKDINRDPNDDFKTFVSEENIKFDEQGYMILDLEKNSSAWEPFKEEFFTARDLYTAYCLSSKDIAAALSCKITSVEWMVMADMPPGQILLSQANLGSLFYLQAEKLEADLNQLEQKKSKESNQELDMGTYIKAVRFVRKNRDLCLERAQKCYDSVIAFAKRNRKIRFHVKDQLDPSIAQSIALSTYGMGVLSLHEGVLAKAEKLFKDSITMAKETEFNELLAEAEKELEKTTVLKAAKKEGLN

SEQ ID NO: 134 - protein, 522 aa, Saccharomyces cerevisiae
MLLIRRTINAFLGCIHCNLTATCILIAFVITMYVVLVSEPASVDGTMGNFLPFSKMDLATKRDRPFYSNCVNTQDYLLNPSYIKQNASFVMLTRNGELEDVIKTINSIEEHFNQWFHYPYVFLNDQPFEEDFKAKVRDVTVGALVEFGTIDEISWNFPSDVKDTFEFYNAIEDQGDRSILYGNLESYHKMCRFYSGLFYKHPLVQKYEWYWRLEPDVEFFCDITYDPFLEMLRTNKKYGFTIIIPELYWTVPNLFRHTKSFISQKGVTLGSLWKLFTKDYDIFESDDPELRDWINYDFQAKAKISEKIAIEQLLKKGDDFQQINDDKEGIMNLIHKARSRKHIVEDKFFNEEYNLCHFWSNFEIARLSVFDNDIYNSFFQYLEKSGGFWKERWGDAPVHSIGLSLTLDLDDVHYFRDIGYRHSTIQHCPHNAMGNEEFSYLASDSKFKRKNAAYDEGREFGCGCRCRCPKKKREIEDSMGFCVNIWVNLLNQQRGHERHVEALNGNEMEEHIREDYLRQFGN

SEQ ID NO: 135 - protein, 673 aa, Saccharomyces cerevisiae
MSTHSNDYFSASSGMVSETSSEVSSINSSQPVSFSKASIAAPVPCSDLHSTKSNDASRKLSISRTLTNRLNDIKKAVDDDNLQTEENSADVNKILESRFDVADAIRLQHNESVQSKLNIPVTHTTTAGASLSAPSSSAFSASSIQNDTTEHKASMDSKLMRNRLYPASTKHSGKDLEAQGITEFEPDEPTVKKVFTNKSTGQLELPPDGGYGWVVTFCVFLTMFSTWGCNASFGVDLAYYLNHDTYPGASKYDYALIAGLTVFLGQLLSPLVMALMRIIGLRTTMLFGDAVMLAAYLLASFTTKLWQLYVTQGFMVGCSISLIFVPATTVLPGWFLKKRAVAMGVSLLGTGAGGVVYGLATNKMLSDFGNTRWCLRIIGISCSISVLVAIALLKERNPTPAIGLKSPRAMFEQLKAMFSLKVITKPFVVLIALWFMFALFAYNMMVFTLSSYAISKGLSSHDASTLTAILNGSQSIGRPLMGLAGDKFGRANVTIVLTTLLTIYMFAFWIPAHTFVQLIFFSILVGSCVGVANVMNTVLIADMVKPEEFLPAWAFVNYCGAPFLLVCEVIAQALTVEKDKSNPYLHAQIFCGCCFIAALILISILREYSIRMKLTERQAMTNEKLKEWKASEYDTDSADEDWGKLKERKTKYDLLLGPGIKKYFLRMVYPMKV

SEQ ID NO: 136 - protein, 584 aa, Saccharomyces cerevisiae
MSREAFDVPNIGTNKFLKVTPNLFTPERLNLFDDVELYLTLIKASKCVEQGERLHNISWRILNKAVLKEHNINRSKKRDGVKNIYYVLNPNNKQPIKPKQAAVKQPPLQKANLPPTTAKQNVLTRPMTSPAIAQGAHDRSLDNPNSTNNDVKNDVAPNRQFSKSTTSGLFSNFADKYQKMKNVNHVANKEEPQTIITGFDTSTVITKKPLQSRRSRSPFQHIGDMNMNCIDNETSKSTSPTLENMGSRKSSFPQKESLFGRPRSYKNDQNGQLSLSKTSSRKGKNKIFFSSEDEDSDWDSVSNDSEFYADEDDEEYDDYNEEEADQYYRRQWDKLLFAKNQQNLDSTKSSVSSANTINSNTSHDPVRKSLLSGLFLSEANSNSNNHNTAHSEYASKHVSPTPQSSHSNIGPQPQQNPPSANGIKQQKPSLKTSNVTALASLSPPQPSNNERLSMDIQKDFKTDNESNHLYESNAPLTAQTILPTALSTHMFLPNNIHQQRMAIATGSNTRHRFSRRQSMDIPSKNRNTGFLKTRMEISEEEKMVRTISRLDNTSIANSNGNGNDDTSNQRTEALGRKTSNGGRI

SEQ ID NO: 137 - protein, 196 aa, Saccharomyces cerevisiae
MKATIQRVTSVFGVPRASVFVPRISTPFILHNYISNGRMDLFSKEFHNGRVSKSDLWSSNKEEELLVSQRKKRPISPHLTVYEPEMSWYLSSLHRISGVLLALGFYAFTITLGVTTIMGMDTTFQDLNKWYHEKMPKWSQWVAKGSAAYLFAFHFGNGIRHLIWDMGYELTNRGVIKTGSIVLAGTLVLGTYLLAQ

SEQ ID NO: 138 - protein, 285 aa, Saccharomyces cerevisiae
MRSSVYSENTYNCIRTSKEHLTERRRVAMAPMFQHFLNLCVEKFPESIEHKDTDGNGNFTTAILEREIIYIPEDDTDSIDSVDSLKCINYKLHKSRGDQVLDACVQLIDKHLGAKYRRASRIMYGNRKPWKANKLAEMKSAGLVYVCYWDNGVLGAFTSFMLTEETGLVEGDALHEVSVPVIYLYEVHVASAHRGHGIGRRLLEHALCDGVARHTRRMCDNFFGVALTVFSDNTRARRLYEALGFYRAPGSPAPASPTIRHTRHGGGRVVVPCDPLYYVYCLHMP

SEQ ID NO: 139 - protein, 449 aa, Saccharomyces cerevisiae
MRLKELLPNFLIVHQEVPEDPIAFKSTDKRENENKEITIPELIDTKVPELADGATDTLYGLLVNGHLQTAYGSFRHFDNIYKVQYKRMIIKYPHGGEGTVDFAVNGRSTKRRKVEKEYVPTSQPVFNGNLKRRYSYYSPDDPKLNSDDAKPMLIILHGLTGGSRESYVRAIVHEITTKYDFEACVFNARGCCYSAITTPLLYNGGWTNDIRYCVNDLRKRFPNRKFYMMGFSLGASIMTNYLGEESDRTKIECAISVSNPFDLYNSAYFINSTPMGSRFYSPALGHNLLRMVRNHLSTLEENPDFKDVIEKHLKKIRTVRQFDNLLTGPMFGYKNAEEYYKNASSYKRIPGIRTPFIALHAQDDPIVGGDLPIDQIKSNPYTLLLETSTGGHVGWFKDRSGRRWYAEPLCRFLKIFHDEITVKGLKPDLENVQLPDPNCEPIATTFRAN

SEQ ID NO: 140 - protein, 229 aa, Saccharomyces cerevisiae
MTVSTSKTPKKNIKYTLTHTLQKWKETLKKITHETLSSIDDSSGSDEKIEALFTVSQPAVVASKGIDRDSGASMSQVGGGVNSTLEMKLTDESEESSSANNTTTTASHTLSNSKKSTQNFENYNVVEERIKLAQKSKAPFCNAEKIWKRRRQLWTQPTEQSESANNDGVTRREIFQAIPQEYYARVYKKLVVDDKPLREPLNLEDALQVINAGWTETRKWANAAKACHD

SEQ ID NO: 141 - protein, 347 aa, Saccharomyces cerevisiae
MVSVEFLQELPKCEHHLHLEGTLEPDLLFPLAKRNDIILPEGFPKSVEELNEKYKKFRDLQDFLDYYYIGTNVLISEQDFFDLAWAYFKKVHKQGLVHAEVFYDPQSHTSRGISIETVTKGFQRACDKAFSEFGITSKLIMCLLRHIEPEECLKTIEEATPFIKDGTISALGLDSAEKPFPPHLFVECYGKAASLNKDLKLTAHAGEEGPAQFVSDALDLLQVTRIDHGINSQYDEELLDRLSRDQTMLTICPLSNVKLQVVQSVSELPLQKFLDRDVPFSLNSDDPAYFGGYILDVYTQVSKDFPHWDHETWGRIAKNAIKGSWCDDKRKNGLLSRVDEVVTKYSH

SEQ ID NO: 142 - protein, 270 aa, Saccharomyces cerevisiae
MAIENIYIARHGYRSNWLPKGPYPPPPTGIDNDVPLSEHGVEQAHELANYISKLDVKPEMIFSSPFYRCLETSKPTVEALKIPLYVDRGVGEWYKPDRPIIPEPATHEVMSKFFPSMISPDWEPSIIPSNKGETEEDIFERCHKFWPVFIDRVERKFPNVKTIMIVTHAATKSALGMNLLKFSSAKEPIDNKGTFIRNGSCAIDKFELVKGENESIPFEEREWKLTMNGNTSFLTNGEEMNWTFMNAFEAGSDADIKARRAAESGKLKME

SEQ ID NO: 143 - protein, 727 aa, Saccharomyces cerevisiae
MNDWHEFNAAIKSIYCNAEGDSSSIINRLVGLAMKSEDSTFIEAVLVLKENVSKVDKQLRFLWLTSTINSRFYPPIPISEASPVSWNKTEYCAPGTEELQRRYPGRAKLQNEEDYSGGIEQCRDVPDCSLVASLINLRSKNLNLPLIKQISSTKYHVNLSFNGSNKRLVTVDISQIPTSVDGKQLSLKSNDISDKIGELALLLVSKGTYSTDGSNISIDTYRLSGFLPEITQVNSYPFEKLWKFHKSNLCLMGAGTGNRSNDMIKPLVENHDYSIIDITYDSRLVKLRDPRNSALNVEISYEQYLKNFKQLYLNWNQEKLFKRSQVLHFRYDTSRYNKFSIVADKPLFHLVNNSKVTETVWLLLESHLQDEGSQENRSVSFLNEAPECIICPIEPPVECGGNHIGLQLVKLRLDAETERLLYCYSTTNNNFSIHSFSVVKEICFQRLKDTKSLFAKVLFSFPYEIEGKASFDTCNFFQNPTFELEVHSEQDYQVLMDAACISTSSHDLINIQVYYFNDYELIKPIMFDNHYQPGQGLKQDVPILTNVKYMIVCSTYGPPASTEFELLASIRLSSSWRLISGITLRSVNLIYGTYPYHCRNRFHWKETSDKLKIQMTLPTKKYSTNKLFIRVVPVESSARLRMRCNIFEPESALCVYECQEYRTCPSGGIVIPDLEVSRTNIVVLMIERSVPISSCLPTEGQLDELELFVGSSQKIRIEKYSDDVIPK

SEQ ID NO: 144 - protein, 161 aa, Saccharomyces cerevisiae
MIKVDTSDALLKNSLTSIKWTLNMLDILFSCDIFSLIKDSIRSLITETFSSVNTVSTSTVKPVRLLCCLVCSNSKSCTISNITRDPESECDKGSRILETDPSFSNGYITLNRFLKYSSFIICFLCLVLTNLMKHSSQNFSFLDSTVAGFLADAGHLWHSIT

SEQ ID NO: 145 - protein, 153 aa, Saccharomyces cerevisiae
MGKKNTKGGKKGRRGKNDSDGPKRELIYKEEGQEYAQITKMLGNGRVEASCFDGNKRMAHIRGKLRKKVWMGQGDIILVSLRDFQDDQCDVVHKYNLDEARTLKNQGELPENAKINETDNFGFESDEDVNFEFGNADEDDEEGEDEELDIDDI

SEQ ID NO: 146 - protein, 775 aa, Saccharomyces cerevisiae
MSFDRPEIYSAPVLQGESPNDDDNTEIIKSFKNFILEFRLDSQFIYRDQLRNNILVKNYSLTVNMEHLIGYNEDIYKKLSDEPSDIIPLFETAITQVAKRISILSRAQSANNNDKDPENTSMDTDSLLLNSLPTFQLILNSNANQIPLRDLDSEHVSKIVRLSGIIISTSVLSSRATYLSIMCRNCRHTTSITINNFNSITGNTVSLPRSCLSTIESESSMANESNIGDESTKKNCGPDPYIIIHESSKFIDQQFLKLQEIPELVPVGEMPRNLTMTCDRYLTNKVIPGTRVTIVGIYSIYNSKNGAGSGRSGGGNGGSGVAIRTPYIKILGIQSDVETSSIWNSVTMFTEEEEEEFLQLSRNPKLYEILTNSIAPSIFGNEDIKKAIVCLLMGGSKKILPDGMRLRGDINVLLLGDPGTAKSQLLKFVEKVSPIAVYTSGKGSSAAGLTASVQRDPMTREFYLEGGAMVLADGGVVCIDEFDKMRDEDRVAIHEAMEQQTISIAKAGITTVLNSRTSVLAAANPIYGRYDDLKSPGDNIDFQTTILSRFDMIFIVKDDHNEERDISIANHVINIHTGNANAMQNQQEENGSEISIEKMKRYITYCRLKCAPRLSPQAAEKLSSNFVTIRKQLLINELESTERSSIPITIRQLEAIIRITESLAKLELSPIAQERHVDEAIRLFQASTMDAASQDPIGGLNQASGTSLSEIRRFEQELKRRLPIGWSTSYQTLRREFVDTHRFSQLALDKALYALEKHETIQLRHQGQNIYRSGV

SEQ ID NO: 147 - protein, 360 aa, Saccharomyces cerevisiae
MSSQEYTTFIDIPVTRAQVEHCSYSFWSSLYPKYVPKSIVLKSLPKKFIQYLEQDGIKLPQEENSRSVYTEEIIRNEDNDYSDWEDDEDTATEFVQEVEPLIDFPELHQKLKDALNELGAVAPKLNWSAPRDATWILPNNTMKCNEVNELYLLLNASNYIMHDLQRAFKGCVDGDDIKGLKFDLVLRQWCDMNPALEFRVFVKNAHIVGATQRDLNYYDYLDELSDTFKDLIDEIVHDVVLPKFPDKSFVLDVYIPRPFNKIFIVDINPFARKTDSLLFSWNEIAAIAPPKNDVEDYELRLVTRHNTGRFASKEHSENHVPQDLVEASLNPEAIRELTQKWKELLSQQAKEESSDSENET

SEQ ID NO: 148 - protein, 149 aa, Saccharomyces cerevisiae
MSATRANKDIFTLFDKKGQGAIAKDSLGDYLRAIGYNPTNQLVQDIINADSSLRDASSLTLDQITGLIEVNEKELDATTKAKTEDFVKAFQVFDKESTGKVSVGDLRYMLTGLGEKLTDAEVDELLKGVEVDSNGEIDYKKFIEDVLRQ

SEQ ID NO: 149 - protein, 369 aa, Saccharomyces cerevisiae
MNQSDSSLMDLPLEIHLSLLEYVPNELRAVNKYFYVLHNHSYKEKSLAWIAEDNYIWAVVKHSLCLYVKSLDPLRQHAREIIQETKEPGFNVPLCMTKYIADSWYIVYNALQYPGKIINMGWDKYTKSQDSNGSDSTSNFNSRPKERTLMQSLTALPVNFWSRRKDEPTPVNVWFYVKNAHVARYIPKIITEIGICNYGPKQIVASAGYINELITSEGIYCVNLGHLPRLYDEQIFEGTGTTHLPLELKAIDRTDSDVCINGDLVLLGYDFIPYQISKPWLLFRIEPVNSIEAIFNYSECSFSYQFAWSLACLQSEEKISFPRDTIIGHGLPYKPSKLIRIFVYKHPEQKQDLGQEIALPNWNTPYLRR

SEQ ID NO: 150 - protein, 393 aa, Saccharomyces cerevisiae
MSSRIIVGSAALAAAITASIMVREQKAKGQRREGNVSAYYNGQEYGSSAPPQLGKLHNIKQGIKEDALSLKDALLGVSQKAREEAPKVTKRVISPEEDAQTRKQLGQKAKDSSSQSIFNWGFSEAERRKAIAIGEFDTAKKRFEEAVDRNEKELLSTVMREKKAALDRASIEYERYGRARDFNELSDKLDQQERNSNPLKRLLKNNTGDANTEEAAARSVQGWGDTAQEFGREELEEAKRNASSEPSEAQKRLDELKKIKEKGWFGYNKGEQSEQQIAERVARGLEGWGETAAQLSKDEMDDLRWNYENSKKQLDKNVSDAMDSLSKAKEDLKQYGSHWWSGWTSKVDNDKQALKDEAQKKYDEALKKYDEAKNKFKEWNDKGDGKFWSSKKD

SEQ ID NO: 151 - protein, 377 aa, Saccharomyces cerevisiae
MSKGRVNQKRYKYPLPIHPVDDLPELILHNPLSWLYWAYRYYKSTNALNDKVHVDFIGDTTLHITVQDDKQMLYLWNNGFFGTGQFSRSEPTWKARTEARLGLNDTPLHNRGGTKSNTETEMTLEKVTQQRRLQRLEFKKERAKLERELLELRKKGGHIDEENILLEKQRESLRKFKLKQTEDVGIVAQQQDISESNLRDEDNNLLDENGDLLPLESLELMPVEAMFLTFALPVLDISPACLAGKLFQFDAKYKDIHSFVRSYVIYHHYRSHGWCVRSGIKFGCDYLLYKRGPPFQHAEFCVMGLDHDVSKDYTWYSSIARVVGGAKKTFVLCYVERLISEQEAIALWKSNNFTKLFNSFQVGEVLYKRWVPGRNRD

SEQ ID NO: 152 - protein, 266 aa, Saccharomyces cerevisiae
MLNVLLRRKAFCLVTKKGMATATTAAATHTPRLKTFKVYRWNPDEPSAKPHLQSYQVDLNDCGPMVLDALLKIKDEQDSTLTFRRSCREGICGSCAMNIGGRNTLACICKIDQNESKQLKIYPLPHMFIVKDLVPDLTNFYQQYKSIQPYLQRSSFPKDGTEVLQSIEDRKKLDGLYECILCACCSTSCPSYWWNQEQYLGPAVLMQAYRWLIDSRDQATKTRKAMLNNSMSLYRCHTIMNCTRTCPKGLNPGLAIAEIKKSLAFA

SEQ ID NO: 153 - protein, 608 aa, Saccharomyces cerevisiae
MHTNSPLRADNQDLETQPLLRPNTEESQLLNDEVRINVANETLIKSRWRSIKCLIIYLLGIVLLSFFGVSIVQYIRGHVPPTDVIEKNLVQVTNFKLVEFQLDGWKDNMGSDLNNDTGKYLQVSIHSQIWFDYDKWPGTENDSDARSQRDWIRYINEKVLKTICIDLNNVTTFDGDLVFKNKLGDVVGMEPICFNLAHRQINNLQFKILVKPSIWKIVKVLKKFWNRDFESLNIKSNLDMTIFKRKFGTRFNLLKLNDEILDWKDIIDWEKISATPLRMIQNMIDGISLQGFTLRDSSSDGFHADMRLNPITILGGVDWLHLPPGTSIPFINWEIKLPDCNGEPAIAIPTLSCFNEPINLHHDKDNIVVCLQNEIEGPLPDELLYQECPQNSLTPMSQIVNAVLNQNETVTFAARGHVLEDGIDNNSLIPADMLEDIFQEASFIPITTNATFNSSELIQEFQINDLQLRWAARKKLSLVGTFLGFFDLSFYETHQQDRVRIDTIRGQIDLYHNDINFLNLPMKQWINSSSHILHDEDTGNTQMKLQFDLENDDMEVVNSLELTRTLNEILFQGFTVIHFNATIDASLTTALGPWVLTGLAGEGDTLVT

SEQ ID NO: 154 - protein, 460 aa, Saccharomyces cerevisiae
MMLEGYTVQPPQSTLIGDIEIQDENANQEVKNVLYQGVQKGIKRLEKRQRRVALGDVTSQKANKIHNAIHNKFHQTKNNFEIENIRSSALVKEQQRDVRHEDSDYFLIDSSEGSSTDDEQVNEDAIDDLLSRRVNDQQIQADEVYEDFDGEMQDVIEEDVDSQIEPLSPINNDEIQTELDRAFEKYFRSVPNPLDDDTHDVVMVVEYASDIFYYLRELEVKYRPNPYYMQNQVELTWPFRRTMIDWLVQLHFRFQLLPETLYLTINIVDRFLSKKTVTLNRFQLVGVSALFIAAKFEEINCPTLDDLVYMLENTYTRDDIIRAEQYMIDTLEFEIGWPGPMPFLRRISKADDYDFEPRTLAKYLLETTIVEPKLVAAAPSWLAAGAYFLSRTILGSNDWSLKHVFYSGYTSSQIIPLASLILENCKNASRRHHSIWKKYFDQKHYRCSQIVEEWIVSTEA

SEQ ID NO: 155 - protein, 200 aa, Saccharomyces cerevisiae
MAGIKLTHKLYQYYQLATSFLYAALLIRWLILMPLVGSRFLPGGIHEFLIYLMFYSSIMEVIWLLRFHGFKYGLLSRTFLKDLNFIYLVSVIHFYDDYEHALILKNASYSSFIISLSLSQAYCHWCKLFKRKGVKERTLVWKVNTFVTLPILYLSEFALLLLNIQVKNYHSTPTLDIINRVVLLAYFPVLLTAYKKLLTK

SEQ ID NO: 156 - protein, 204 aa, Saccharomyces cerevisiae
MGAYKYLEELQRKKQSDVLRFLQRVRVWEYRQKNVIHRAARPTRPDKARRLGYKAKQGFVIYRVRVRRGNRKRPVPKGATYGKPTNQGVNELKYQRSLRATAEERVGRRAANLRVLNSYWVNQDSTYKYFEVILVDPQHKAIRRDARYNWICDPVHKHREARGLTATGKKSRGINKGHKFNNTKAGRRKTWKRQNTLSLWRYRK

SEQ ID NO: 157 - protein, 255 aa, Saccharomyces sp.
MAVGKNKRLSKGKKGQKKRVVDPFTRKEWFDIKAPSTFENRNVGKTLVNKSTGLKSASDALKGRVVEVCLADLQGSEDHSFRKIKLRVDEVQGKNLLTNFHGMDFTTDKLRSMVRKWQTLIEANVTVKTSDDYVLRIFAIAFTRKQANQVKRHSYAQSSHIRAIRKVISEILTKEVQGSTLAQLTSKLIPEVINKEIENATKDIFPLQNIHVRKVKLLKQPKFDVGALMALHGEGSGEEKGKKVTGFKDEVLETV

SEQ ID NO: 158 - protein, 225 aa, Saccharomyces cerevisiae
MVVINGVKYACETCIRGHRAAQCTHTDGPLQMIRRKGRPSTTCGHCKELRRTKNFNPSGGCMCASARRPAVGSKEDETRCRCDEGEPCKCHTKRKSSRKSKGGSCHRRANDEAAHVNGLGIADLDVLLGLNGRSSDVDMTTTLPSLKPPLQNGEIKADSIDNLDLASLDPLEQSPSISMEPVSINETGSAYTTTNTALNDIDIPFSINELNELYKQVSSHNSHSQ

SEQ ID NO: 159 - protein, 133 aa, Saccharomyces cerevisiae
MDRDHINDHDHRMSYSINKDDLLLMVLAVFIPPVAVWKRKGMFNRDTLLNLLLFLLLFFPAIIHACYVVYETSSERSYDLSRRHATAPAVDRDLEAHPAEESQAQPPAYDEDDEAGADVPLMDNKQQLSSGRT

SEQ ID NO: 160 - protein, 119 aa, Saccharomyces cerevisiae
MPHLAAEAHTWPPHISHSTLSIPHPTPEHRHVFHKKDVKNKRNEEKGNNLLYVLFRTTVIKSSFRSLSTAGRELLFVVHQGHIGTGLIVFIICWRLCLRFLCRVSFQVTVYGGRSRMSA

SEQ ID NO: 161 - protein, 329 aa, Saccharomyces cerevisiae
MCSRILLSGLVGLGAGTGLTYLLLNKHSPTQIIETPYPPTQKPNSNIQSHSFNVDPSGFFKYGFPGPIHDLQNREEFISCYNRQTQNPYWVLEHITPESLAARNADRKNSFFKEDEVIPEKFRGKLRDYFRSGYDRGHQAPAADAKFSQQAMDDTFYLSNMCPQVGEGFNRDYWAHLEYFCRGLTKKYKSVRIVTGPLYLPKKDPIDNKFRVNYEVIGNPPSIAVPTHFFKLIVAEAPTANPAREDIAVAAFVLPNEPISNETKLTDFEVPIDALERSTGLELLQKVPPSKKKALCKEVNCQIVVRDFSNAAIKQSKDVKLLPPPKKRN

SEQ ID NO: 162 - protein, 215 aa, Saccharomyces cerevisiae
MNGIQVDINRLKKGEVSLGTSIMAVTFKDGVILGADSRTTTGAYIANRVTDKLTRVHDKIWCCRSGSAADTQAIADIVQYHLELYTSQYGTPSTETAASVFKELCYENKDNLTAGIIVAGYDDKNKGEVYTIPLGGSVHKLPYAIAGSGSTFIYGYCDKNFRENMSKEETVDFIKHSLSQAIKWDGSSGGVIRMVVLTAAGVERLIFYPDEYEQL

SEQ ID NO: 163 - protein, 109 aa, Saccharomyces cerevisiae
MSQIAQEMTVSLRNARTQLDMVNQQLAYLDRQEKLAELTKKELESYPTDKVWRSCGKSFILQDKSKYVNDLSHAETVLLDQRKTLKIKKNYLETTVEKTIDNLKALMKN

SEQ ID NO: 164 - protein, 345 aa, Saccharomyces cerevisiae
MEAHNQFLKTFQKERHDMKEAEKDEILLMENSRRFVMFPIKYHEIWAAYKKVEASFWTAEEIELAKDTEDFQKLTDDQKTYIGNLLALSISSDNLVNKYLIENFSAQLQNPEGKSFYGFQIMMENIYSEVYSMMVDAFFKDPKNIPLFKEIANLPEVKHKAAFIERWISNDDSLYAERLVAFAAKEGIFQAGNYASMFWLTDKKIMPGLAMANRNICRDRGAYTDFSCLLFAHLRTKPNPKIIEKIITEAVEIEKEYYSNSLPVEKFGMDLKSIHTYIEFVADGLLQGFGNEKYYNAVNPFEFMEDVATAGKTTFFEKKVSDYQKASDMSKSATPSKEINFDDDF

SEQ ID NO: 165 - protein, 468 aa, Saccharomyces cerevisiae
MNLKLSAIESYFFHRSRLNLHSCFYVGIKLNELPKKSQLIAALKYTVIQHERLTCNVFYDELKKENFLQNILEPLKFCDLVEYRHDWDQLGETEINHIFQRYNFSYNENKPLWKILILPNQNQMLLLTDHVLMDGMSAIHVWETFMEGLQMQQPVEIDETIYSPSLNSSTEKIMSAPLYGDWPIPWNWHIVRQLVSRLHYWFPQTVVKNNRNLIQFANYSFPKDLLDDKPSDGTQKYKVKNTNHQWEFRLSPTHLNDILQECKANNTSLTSLLGALVCTSFEKIAAHEYTGSFLKIELPMNIRKPFERVLKLPSDDKLAVGNFIAVIEFNHKLHQNRGIWDIASQIQRAIRSSSEDKIIDKVNEVKLLEVISSQQYIEDKISLNNGPSSTFEVTNLGFQTFKDACNTSLPFYIVDATFNEPQGISSIFSLSVISTPGNGLHCCISYPNTLTKVLEPHWQYMKDYLNLY

SEQ ID NO: 166 - protein, 189 aa, Saccharomyces cerevisiae
MDDKKTWSTVTLRTFNQLVTSSLIGYSKKMDSMNHKMEGNAGHDHSDMHMGDGDDTCSMNMLFSWSYKNTCVVFEWWHIKTLPGLILSCLAIFGLAYLYEYLKYCVHKRQLSQRVLLPNRSLTKINQADKVSNSILYGLQVGFSFMLMLVFMTYNGWLMLAVVCGAIWGNYSWCTSYSPEIDDSSLACH

SEQ ID NO: 167 - protein, 467 aa, Saccharomyces cerevisiae
MRISKNSHKRQRTRLYFLVTFIIYSIIPCRAVLVPWLDDDPFEATLLEMGDEPWSKDILSSTPPLHPSEVTEDNKSLKQRGNVPQYVIDNSPLLHLYSEEKYWPADVKDFVKRFQLRDHSGEKIINEHLRDLSDLQEYYSVELENGTWGRVSSEGTYMTSLDDFDKGPDWLLGEQPEYGTGHIKKAPAVLFVVDKGNGWVDAFWFYFYPFNWGPYIMGSGPWGNHVGDWEHSLVRFYKGEPQYLWMSAHGGGSAYKFEAIEKIKRLRRVDGKLTNEVIKKPLIFSARGTHAHYASVGQHAHDVPFFFMPLSDFTDRGPLWDPSLNYYAYTVTVGEKMTPCGAEETKMGLEWLSFKGAWGDKQLRPRDPRQKWCPFQWKYIDGPKGPLFKNMERVSLCQRFKWWNFWKGCPARRYIKRGEGLDAEKNDLVGDNCGILLYNIRPKWLRSILRFLTWRGSVCFIMDYFTG

SEQ ID NO: 168 - protein, 490 aa, Saccharomyces cerevisiae
MFRIQLRTMSSKTCKSDYPKEFVSFLNSSHSPYHTVHNIKKHLVSNGFKELSERDSWAGHVAQKGKYFVTRNGSSIIAFAVGGKWEPGNPIAITGAHTDSPALRIKPISKRVSEKYLQVGVETYGGAIWHSWFDKDLGVAGRVFVKDAKTGKSIARLVDLNRPLLKIPTLAIHLDRDVNQKFEFNRETQLLPIGGLQEDKTEAKTEKEINNGEFTSIKTIVQRHHAELLGLIAKELAIDTIEDIEDFELILYDHNASTLGGFNDEFVFSGRLDNLTSCFTSMHGLTLAADTEIDRESGIRLMACFDHEEIGSSSAQGADSNFLPNILERLSILKGDGSDQTKPLFHSAILETSAKSFFLSSDVAHAVHPNYANKYESQHKPLLGGGPVIKINANQRYMTNSPGLVLVKRLAEAAKVPLQLFVVANDSPCGSTIGPILASKTGIRTLDLGNPVLSMHSIRETGGSADLEFQIKLFKEFFERYTSIESEIVV

SEQ ID NO: 169 - protein, 576 aa, Saccharomyces cerevisiae
MIALPVEKAPRKSLWQRHRAFISGIVALIIIGTFFLTSGLHPAPPHEAKRPHHGKGPMHSPKCEKIEPLSPSFKHSVDTILHDPAFRNSSIEKLSNAVRIPTVVQDKNPNPADDPDFYKHFYELHDYFEKTFPNIHKHLKLEKVNELGLLYTWEGSDPDLKPLLLMAHQDVVPVNNETLSSWKFPPFSGHYDPETDFVWGRGSNDCKNLLIAEFEAIEQLLIDGFKPNRTIVMSLGFDEEASGTLGAASLASFLHERYGDDGIYSIIDEGEGIMEVDKDVFVATPINAEKGYVDFEVSILGHGGHSSVPPDHTTIGIASELITEFEANPFDYEFEFDNPIYGLLTCAAEHSKSLSKDVKKTILGAPFCPRRKDKLVEYISNQSHLRSLIRTTQAVDIINGGVKANALPETTRFLINHRINLHSSVAEVFERNIEYAKKIAEKYGYGLSKNGDDYIIPETELGHIDITLLRELEPAPLSPSSGPVWDILAGTIQDVFENGVLQNNEEFYVTTGLFSGNTDTKYYWNLSKNIYRFVGSIIDIDLLKTLHSVNEHVDVPGHLSAIAFVYEYIVNVNEYA

SEQ ID NO: 170 - protein, 167 aa, Saccharomyces cerevisiae
MNLRFELQKLLNVCFLFASAYMFWQGLAIATNSASPIVVVLSGSMEPAFQRGDILFLWNRNTFNQVGDVVVYEVEGKQIPIVHRVLRQHNNHADKQFLLTKGDNNAGNDISLYANKKIYLNKSKEIVGTVKGYFPQLGYITIWISENKYAKFALLGMLGLSALLGGE

SEQ ID NO: 171 - protein, 321 aa, Saccharomyces cerevisiae
MTRPPLVRGIFSLGLSVAVLKGVEKTVRKHLERQGWIEPQKVDYELIFTIDRLKNLVDNKREALTAEQPDAGELSWRKVFNFISRQSSELDTRIYVLILLLSFLLPIAWTVLDGDRETTLEDKDNDCNVDLIENERRLKHYNDGERAVLQFGKNRSEPIILSYKDMNVLEGEHEFTSKEEHSNSHLTSKSENALNQVGSEDLLGCHLEKQLEEDKNEPNGEADGEDDNNREKDCSSSSEVESQSKCRKESTAEPDSLSRDTRTTSSLKSSTSFPISFKGSIDLKSLNQPSSLLHIQVSPTKSSNLDAQVNTEQAYSQPFRY

SEQ ID NO: 172 - protein, 346 aa, Saccharomyces cerevisiae
MKASHICSYLLSIAPLVVSHGVHHNRDHGHEANHESKQSFLILKQESIFYSLVCFLQNHLFVLGPRYNAIVAILIIQLMPCLFVLFVPGLRKNDRASLTLSLLVSFSLGTLLGDILLHVIPESLSGVTDVTMVGGAIFLGFISFLTLDKTMRILSGTSNDDGSIHSHSHSHTPQQTAEKKAGFNMSAYLNVISGIAHHITDGIALATSFYSSTQVGIMTSIAVTFHEIPHELGDFAILLSSGFTFPQAIRAQAVTAFGAVVGTSIGCWMNEIGNNSHKATSSSANASELMLPFTAGGLIYIATTSVVPQILHSSAPDSKLREFKKWALQLVFIFVGFAVMALMDEH

SEQ ID NO: 173 - protein, 122 aa, Saccharomyces cerevisiae
MAVPGYYELYRRSTIGNSLVDALDTLISDGRIEASLAMRVLETFDKVVAETLKDNTQSKLTVKGNLDTYGFCDDVWTFIVKNCQVTVEDSHRDASQNGSGDSQSVISVDKLRIVACNSKKSE

SEQ ID NO: 174 - protein, 230 aa, Saccharomyces cerevisiae
MPVPSVTVTTDNEYEDISSFSSIDSYKPEPFTGFKDSEAPEQPLLKNDTIVGKGQLEDDSNVDDQHRHSDVHSHHSSSTLKRPTSNSIEKMVTHNALEGNSETVDSLKEDGLNLNKKALPDITAPVTNSAHDAAFPEEYRLETETGLVKLKTLESLKREDSRVSSTKKEHINDHTDMHSTRSKVTTNSQGSSLEPNKLNMAVEKNKKRIEKYQKHKSEKGIKGFFHRIFD

SEQ ID NO: 175 - protein, 430 aa, Saccharomyces cerevisiae
MDDISGRQTLPRINRLLEHVGNPQDSLSILHIAGTNGKETVSKFLTSILQHPGQQRQRVLIGRYTTSSLLNAKEEDISINNEAISLIEYSRIEKELIEADSSLKLQCNNLELLTSVALVYFAKKNCQWCIIETGLAGKQDPGSIIAGQSRVCCAITNVGISDEAFLCKFLSQITESSTNKAIFLLDGSNDEFVRNTITKRCHDVGCPLEITDPSLRDYNVHTDTWGTLEVRLPYSEEEYQIFNLRVAIAVLDFLSKEKKVCISKDQLSQGLISVDWPRSLHRLDYCYESTSGKKIALLLDNANNAKAARNLACHLRTTYGDTPLTFVIAITTGKKVSPLLDPLIRPQDYVIVTRFGSVVGMPWIQSLEPVNLLAFIKNRYTRNVNMQPDLQSVWTFLETSGLKTIVPVIVCGSLYICKELLRLHNCHLPV

SEQ ID NO: 176 - protein, 683 aa, Saccharomyces cerevisiae
MNKELASKFLSSIKHEREQDIQTTSRLLTTLSIQQLVQNGLAINNIHLENIRSGLIGKLYMELGPNLAVNDKIQRGDIKVGDIVLVRPAKTKVNTKTKPKVKKVSEDSNGEQAECSGVVYKMSDTQITIALEESQDVIATTFYSYSKLYILKTTNVVTYNRMESTMRKLSEISSPIQDKIIQYLVNERPFIPNTNSFQNIKSFLNPNLNDSQKTAINFAINNDLTIIHGPPGTGKTFTLIELIQQLLIKNPEERILICGPSNISVDTILERLTPLVPNNLLLRIGHPARLLDSNKRHSLDILSKKNTIVKDISQEIDKLIQENKKLKNYKQRKENWNEIKLLRKDLKKREFKTIKDLIIQSRIVVTTLHGSSSRELCSLYRDDPNFQLFDTLIIDEVSQAMEPQCWIPLIAHQNQFHKLVLAGDNKQLPPTIKTEDDKNVIHNLETTLFDRIIKIFPKRDMVKFLNVQYRMNQKIMEFPSHSMYNGKLLADATVANRLLIDLPTVDATPSEDDDDTKIPLIWYDTQGDEFQETADEATILGSKYNEGEIAIVKEHIENLRSFNVPENSIGVISPYNAQVSHLKKLIHDELKLTDIEISTVDGFQGREKDVIILSLVRSNEKFEVGFLKEERRLNVAMTRPRRQLVVVGNIEVLQRCGNKYLKSWSEWCEENADVRYPNIDDYL

SEQ ID NO: 177 - protein, 353 aa, Saccharomyces cerevisiae
MIQFKSPGNWLFIVPWIAFIPWYGMLIAMLICWASQGHPIYWFMHSEQFPVYISDIGATNLRPLFISCAGWQGLGYVITVALEFFQRSGYLPFQLKKKDPSISDSTSYAEKLHSGKYLMPPYYTKDERNLIFAAFVLGSIGELALLFSSIFSTALYHRVHIAMVSVFVVFMFLSTCCLIAEYFLMGRHYASVHPLASPHFNPQSSEKSFNQDYNTVDELPWYKWKGHVWNKFTISATLKVIWLTLAVVWAICFGAINDRSKSACFEWLLAFWFGIIFMILSADFYLGGRYRQSRYFNHVESFSGYYKYDKALGLYHSEDVLPSDDNAGVIATETASSNIYNNSSSNESIQVVV

SEQ ID NO: 178 - protein, 263 aa, Saccharomyces cerevisiae
MIATSRAVNMNKESKHKKAVAKPCRERQTSVTRAMRPAVARDPRRLSTSSSPSSSPMSAQRRLSREEIINEMEKEQDAIVVRLLREIETLKEENSRLKNQLHHPVPARRSSPFFEGESAILDDDDCNYGYTLDTPKLKLTDGASRHTVLPLTPKDSMTHISHSARRSSRNASISNGTSISDTIFPIETKIHSAPTTNRNLPSADLPHHTLLPRSLSGISSSDLTESGALLHDRRRRSSNYSLDGSNSLKADLMAKRFQTGSLK

SEQ ID NO: 179 - protein, 312 aa, Saccharomyces cerevisiae
MCILMATRAHPDYELILISNRDEFLARKTHATCWHNNDFILSPYDLAKTSAEKQIFGTWSGINKEGKLATILNLKLDNEQNNTKSRSRGLLPFIFLSIHKADFEDWDNYKKFEGHYDGLKSTGDFNFFYGDVIKKQYKVIDSLGRTFDVLSSTCRKDLDSYMVVSNGKFYDSSSIPGQAWEKVKVARDSLENLVLENIESDEEKIISSCFQLASKSSLPSTISNPDVLQMVDPNVTMNTIYVPPLRRPPRDDLGASIPDGDYYGTRSQIVLLVSKDSTRVTFIERVLYSSDEDVRKYSVTSPKEEKRFKFKL

SEQ ID NO: 180 - protein, 492 aa, Saccharomyces cerevisiae
MESRTTGPLTTETYDGPTVAFMILGAALVFFMVPGLGFLYSGLARRKSALALIWVVLMATLVGILQWYFWGYSLAFSKSAPNNKFIGNLDSFGFRNVYGKKFDEDAYPELAYATFQMMFSCVNLSIIAGATAERGRLLPHMVFLFILATIGYCPVTYWIWSPGGWAYQWGVLDWAGGGNIEILSAVSGFVYSWFLGKRNEKLLINFRPHNVSLVTLGTSILWFGWLLFNSASSLSPNLRSVYAFMNTCLSAITGGMTWCLLDYRSEKKWSTVGLCSGIISGLVAATPSSGCITLYGSLIQGIVAGVVCNFATKLKYYAKVDDAMDILAEHGVAGVIGLIFNALFGADWVIGMDGTTEHEGGWVTHNYKQMYKQIAYIAASIGYTAAVTAIICFVLGYIPGMRLRISEEAEEAGMDEDQIGEFAYDYVEVRRDYYLWGVDEDSQRSDVNHRVNNAHLAAERSSSGTNSSSDGNGEMIQSEKILPIHQEDPANR

SEQ ID NO: 181 - protein, 282 aa, Saccharomyces cerevisiae
MDPSLVLEQTIQDVSNLPSEFRYLLEEIGSNDLKLIEEKKKYEQKESQIHKFIRQQGSIPKHPQEDGLDKEIKESLLKCQSLQREKCVLANTALFLIARHLNKLEKNIALLEEDGVLAPVEEDGDMDSAAEASRESSVVSNSSVKKRRAASSSGSVPPTLKKKKTSRTSKLQNEIDVSSREKSVTPVSPSIEKKIARTKEFKNSRNGKGQNGSPENEEEDKTLYCFCQRVSFGEMVACDGPNCKYEWFHYDCVNLKEPPKGTWYCPECKIEMEKNKLKRKRN

SEQ ID NO: 182 - protein, 687 aa, Saccharomyces cerevisiae
MCASLNEVKKNDTYGVSQKGYNDNFSESEGVLHGSKSMPTSMKNMLQSPTMVNMCDILQNKEAANDEKPVIPTTDTATAGTGTEDISSTQSEETDQNSHLIASEILEGTFKDVSYKEYANFLGNDNNNQVLTEFVKLLSPLPSSLLETLFNLSKSIYFIAEAQNIDRILECLSIEWIACHPNTHWKSGYKSCHIVLFSLLILNSDLHNNFQVDHKKIKFSMVAFINNTLRALREENEYEELKIYSREHLIIEELSEYYKTLNETPLPLCTESRTSINISDNQSSLKRFSTLGSREFSTSNLRSVNSNSTTLYSRDGQVSVREMSAKSNKNFHNNHPMDALYLKESFDDGLITENGSSWFMDDLILISKKSLPRKYSKRDKDQVAAPKMTSKRNKSFFGWLKPSKTTTLIEHTSRRTSLSYLNKDSEWERVKIQVKEGRIFIFKIKPDVKDIIQSSETDSATIDYFKDISSSYFAYSLLEAEAHVVQDNIIIGSGAMKSNVCNKNTKRKSGNFTVSFPENINGPKLVLEFQTRSVEEAHKFMDCINFWAGRISPVPLTQFEAVSNAEYGWSDKILTEHASLNLKNIVVSEWKPLLGLELLYEDAKDVEMVELKERLKELMNFTRQLGIWIDKHNEIKDKLVEIWSFDDNYFEAVMNNWNSRYLYMNNQYKKRLSYLKALQKAMGSVQF

SEQ ID NO: 183 - protein, 512 aa, Saccharomyces cerevisiae
MVATIMQTTTTVLTTVAAMSTTLASNYISSQASSSTSVTTVTTIATSIRSTPSNLLFSNVAAQPKSSSASTIGLSIGLPIGIFCFGLLILLCYFYLKRNSVSISNPPMSATIPREEEYCRRTNWFSRLFWQSKCEDQNSYSNRDIEKYNDTQWTSGDNMSSKIQYKISKPIIPQHILTPKKTVKNPYAWSGKNISLDPKVNEMEEEKVVDAFLYTKPPNIVHIESSMPSYNDLPSQKTVSSKKTALKTSEKWSYESPLSRWFLRGSTYFKDYGLSKTSLKTPTGAPQLKQMKMLSRISKGYFNESDIMPDERSPILEYNNTPLDANDSVNNLGNTTPDSQITSYRNNNIDLITARPHSVIYGTTAQQTLETNFNDHHDCNKSTEKHELIIPTPSKPLKKRKKRRQSKMYQHLQHLSRSKPLPLTPNSKYNGEASVQLGKTYTVIQDYEPRLTDEIRISLGEKVKILATHTDGWCLVEKCNTQKGSIHVSVDDKRYLNEDRGIVPGDCLQEYD

SEQ ID NO: 184 - protein, 527 aa, Saccharomyces cerevisiae
MSLSQVSPLPHIKDVVLGDTVGQGAFACVKNAHLQMDPSIILAVKFIHVPTCKKMGLSDKDITKEVVLQSKCSKHPNVLRLIDCNVSKEYMWIILEMADGGDLFDKIEPDVGVDSDVAQFYFQQLVSAINYLHVECGVAHRDIKPENILLDKNGNLKLADFGLASQFRRKDGTLRVSMDQRGSPPYMAPEVLYSEEGYYADRTDIWSIGILLFVLLTGQTPWELPSLENEDFVFFIENDGNLNWGPWSKIEFTHLNLLRKILQPDPNKRVTLKALKLHPWVLRRASFSGDDGLCNDPELLAKKLFSHLKVSLSNENYLKFTQDTNSNNRYISTQPIGNELAELEHDSMHFQTVSNTQRAFTSYDSNTNYNSGTGMTQEAKWTQFISYDIAALQFHSDENDCNELVKRHLQFNPNKLTKFYTLQPMDVLLPILEKALNLSQIRVKPDLFANFERLCELLGYDNVFPLIINIKTKSNGGYQLCGSISIIKIEEELKSVGFERKTGDPLEWRRLFKKISTICRDIILIPN

SEQ ID NO: 185 - protein, 153 aa, Saccharomyces cerevisiae
MTFLQFINNNRQEGQGYISEKLFKTKKNEMIRKTVTNLVAVRLKNLSHEFDVIENYLRYIASTSEHLFTAIKRHFNKCARKLLKEAIDSKSNSETATVVLQEGFSGICLLKASSIILKLKLKFPKKKDRTDISKLCDKKERMTQWLEISILMN

SEQ ID NO: 186 - protein, 142 aa, Saccharomyces cerevisiae
MAYNQEDSKRLSDKYKKEGHFDKLKREILSNPWNNTEENSESFEQALRKRVASTVKEMVNEDEELIFKNRGLTSALIESQLVKDNYLKLGSKMEGDNGDGEKKFDLDVYVRSKLQDPKLLEMIKGQLQETLNSYEEEANGST

SEQ ID NO: 187 - protein, 483 aa, Saccharomyces cerevisiae
MYLSFYITDTKNKLIFQYLLGATAPSFKHLWTRVRTTCPQLLEDSSSDDYLDHSMVGRDLEVYKYFSVINKLNYWCLASTSKSKGPLDCFTFLETIDRILLEYFDKDKLSIKKIVNNYDRISLIFNCCVEAGEPNVSDMLYVNKIKEAVPERSDLSKFISSTAHNLQQAVQLPQQRQQQLQQNQISRGSNSLIENEEIVPWRTSRASKHENNELYVDLLETFHVVFEKKKSHLRLLTGSIHGIVDVRSYLNDNPLVAVKLNTMGNDIGIPSLHDCVEINDGVFSPSNITFIPPDGKFRLLEYSVDLSSQVKQSGVRMNSIGLMSLHFQNGLGKDSDEFELSLNIENFKKVSQVDDLKIDLQFNVENADPNEIAYKIKILRNTHGRFENSIIMGQGQWIFDKSTATGTVPVLRGCIEYENTGPNFTKKVDLQTVSLEYSYIGQSASGIYVEAIDIVSGLTIGKNTKLYKGAKYKTQTGNFQVRL

SEQ ID NO: 188 - protein, 104 aa, Saccharomyces cerevisiae
MKFLKNKAPANLVDNGRFVEAITCNKVKPNPSCVSNCLKFLSEVLAVEAITDSARNLATVSKSDILLFSLLQLSSNKQSGSSLPLFDLVFILLSTFFLFHNPCN

SEQ ID NO: 189 - protein, 191 aa, Saccharomyces cerevisiae
MASSSSTLPLHMYIRPLIIEDLKQILNLESQGFPPNERASEEIISFRLINCPELCSGLFIREIEGKEVKKETLIGHIMGTKIPHEYITIESMGKLQVESSNHIGIHSVVIKPEYQKKNLATLLLTDYIQKLSNQEIGNKIVLIAHEPLIPFYERVGFKIIAENTNVAKDKNFAEQKWIDMERELIKEEYDN

SEQ ID NO: 190 - protein, 225 aa, Zea mays
MRRLWRWYQQCLAAHPVRTQVVSSGILWGLGDIGAQTVTYYSASPDRRGHDSSPPDPEDKDNKDNKEFKVDWKRVGITSSFGFAFVGPVGHYWYEYLDRIIRRRFQPNTFKFVASKVAADGFLFGPLDLLLFFSYVGLGQGRSIEQVKEDVKRDFIPALVLGGTIWPAVQIANFRFVPVRYQLLYVNLFCLLDSCFLSWIEQQGDASWKRWFTSFQKIEDQKGKV

SEQ ID NO: 191 - protein, 235 aa, Arabidopsis thaliana
MLKLWRWYQRCLTVHPVKTQVISSGFLWGFGDVTAQYITHSTAKRRLLRLTETNKDADADTEIKVKWKQDAEFKVNWKRVAITSMFGFGFVGPVGHFWYEGLDKFIKLKLRYVPKSTRFVAAKVAMDGLIFGPVDLLVFFTYMGFATGKNTAEVKEGLKRDFLPALALEGGAWPLLQIANFRYVPVQYQLLYVNIFCLVDSAFLSWVEQQKDAAWKQWFTSSFQPLKERGGQGGV

SEQ ID NO: 192 - protein, 472 aa, Glycine max
MEPRVANKFRLGRKIGSGSFGEIYLGTNTQTNEEVAVKLENVKTKHPQLLYESKLYKILQGGTGIPNVRWFGVEGDYNVLVMDLLGPSLEDLFNFCTRKLSLKTVLMLADQMINRVEFIHSKSFLHRDIKPDNFLMGLGRRANQVYAIDFGLAKKHRDTSTHQHIPYRENKNLTGTARYASMNTHLGIEQSRRDDLESLGFVLMYFLRGSLPWQGLKAGTKKQKYERISEKKVSTSIESLCRSYPSEFASYFHYCRSLQFDDKPDYAYLKRLFRDLFIREGFQFDYVFDWTILKYQQSQIATPPARAIGPAAGPSSGLPPAVVNADRQTGGENSRHTGWSSSDPARRRNSGPIANDGMLSRQKAPFPSDSTRSKDVMLSSSNFRSSGSTRRGVVSSSRDATVGNETEPSHPLTVDASQGALRKISGAQRSSPIMPFEHNRTSSGRNTSNMKNYESTIRGIETLNFNDERLQY

SEQ ID NO: 193 - protein, 306 aa, Glycine max
MPSHADLDRQIEHLMECKPLPEAEVKALCDQARAILVEEWNVQPVKCPVTVCGDIHGQFYDLIELFRIGGNAPDTNYLFMGDYVDRGYYSVETVTLLVALKVRYRDRITILRGNHESRQITQVYGFYDECLRKYGNANVWKFFTDLFDYLPLTALIESQIFCLHGGLSPSLDTLDNIRALDRIQEVPHEGPMCDLLWSDPDDRCGWGISPRGAGYTFGQDIAAQFNHTNGLSLISRAHQLVMEGFNWCQDKNVVTVFSAPNYCYRCGNMAAILEIGENMDQNFLQFDPAPRQIEPDTTRKTPDYFL

SEQ ID NO: 194 - protein, 423 aa, Glycine max
MERIVGGKYKLGRKIGSGSFGEIYLATHIDTFEIVAVKIENSKTKHPQLLYEAKLYNILQGGSGIPNIKWSGIDGEDNVLVIDLLGPSLEDLFVYCGRKFSLKTVLMLADQMITRIEYVHSKGFLHRDIKPDNFLMGLGRKANQVYIIDFGLAKRYRDSTTNRHIPYRENKNLTGTARYASCNTHLGIEQSRRDDLESLGYVLLYFLRGSLPWQGLKAATKKQKYDKICQKKLSTPIEVLCKSHPVEFASYFHYCHSLTFDQRPDYGFLKRLFRDLFARDGYDFDYVFDWTILKYQQSQKNPVPGASNSRAIPMDIDNHQGLNSYSGHVKERIRAGDATGSGVKIQFKSPVGKNLSYEKPLDKNIFGEANIPSTSFSPASTSQRNSLKQSLSAEASNPGHAQGSKIGPSSSLMSSLQHMSSAK

SEQ ID NO: 195 - protein, 651 aa, Glycine max
MSSPGFPGGGSASEFFAGAGVFGGRSIPGATMNNPNAAASATINNLHPLYRTQQQQNLPAMFLDPSSQIAQRQTPTFIGKRTLTEFQAYNQTNNNPNHVLSNLLLRSVKPRTSLYHTSMDFPVPELQNQNLYSNQTQRFGVPLLHQLRPQPINLPNNGPVPMTGPNFGYRNSNLGLPQNQNRVRVSLPVSVPVQVHSSEPEKKIMDHRLLELEKQLLEDNDDEGEADAASVITTSEWSETYQNLISPSPVQKPVLTTTSPTSSTTSSTSSSSSVASPASGCSKQTLMEAASAIVEGKHDVAAEILNRLNGVNRSDRLTDCMVSALKSRMNPVEYPPPVAELFRKEHADSTQMLLENSVCFTVGFMAANLAILEAAFEEKTETSRFCVVDFEIGQGKQYLHLLNALSARGQNVAVKIAAVAEKGGEERVRAVGDMLRLLAERLRIRFEFKIVATQKIAELTRESLGCDADDVLMVNFAFKLNKIPDESVSPENPRDELLRRVKRLAPRVVTVVEQEINGNTAPFLARVAETLSYYGALLESIEATTVGKDNSINNSDRVRLEEGLSRKLHNSVACEGRDRVERCEVFGKWRARMSMAGFELKPLSQSMVESIKARLISANNRVNSGLTVKEENGGICFGWMGRTLTVASAWR

SEQ ID NO: 196 - protein, 217 aa, Saccharomyces cerevisiae
MSSLLISYESDFKTTLEQAKASLAEAPSQPLSQRNTTLKHVEQQQDELFDLLDQMDVEVNNSIGDASERATYKAKLREWKKTIQSDIKRPLQSLVDSGDRDRLFGDLNASNIDDDQRQQLLSNHAILQKSGDRLKDASRIANETEGIGSQIMMDLRSQRETLENARQTLFQADSYVDKSIKTLKTMTRRLVANKFISYAIIAVLILLILLVLFSKFK

SEQ ID NO: 197 - protein, 221 aa, Glycine max
MSNVFEGYERQYCELSANLAKKCTAAGALNGEQKKQKVSEVKAGIDEAEALIRKMDLEARSLQPNIKGVLLAKLREYKSDLNNLKSEVKKIVSGNLNPSARDELLESGMADAMTASADQRTRLMVSTERLNKTSDRVKDSRRTMLETEELGVSILQDLHSQRQSLLHAHNTLHGVDDNIGKSKKILTNMSRRMNKNKWVIGGIVLVLVIAIIVILYFKFSK

SEQ ID NO: 198 - protein, 207 aa, Physcomitrella patens
MVAESVLVCRSSVVGAGLQSFVGEGAKRESAGPGRSVFLGAQVQKMGAGMSARSDVRPAAVPKASGDVSEQTDYKTFSDEEWKKRLSQQQFYVARKKGTERPFTGEYWNTKTAGTYLCVCCKTPLFSSKTKFDSGTGWPSYYDTIGDNVKSHMDWSIPFMPRTEVVCAVCDAHLGHVFDDGPRPTGKRYCINSAAIDLKAEKQEERN

SEQ ID NO: 199 - protein, 672 aa, Physcomitrella patens
MQINNGFLHLVSTLLGLLHLATFATAELKTIEFSFPNFKSPENDGTINIPNATDVPSGRNVLFLPKEKNAMSVGWVIYEEKVQFWDNSDDAASFSTEFTFSTSGYNASTGGSGLAFLITPDFSIGDIRGYLGIFSSTTNASTNNQKIAVEIDVFKNPWDPSASHIGLDVNSIESVKVKDYCPVMDNRCTYFTNKGDINVWIDYMAESETLEVRLAMGSSSVKPTQPDLQFIGLNLPRTIRNFMYVGFSAATGSDFYPAHTFRLRRWSFKTTAPSNGKKNILLIAVLSAAAGLIFIIIVVLLCICRARLRCCCCAPAPAPCLDDPFPQIAQLASGPRIFTYRELSDATKGFSENELLGQGGFGKVFRGVLRSGTMIAVKKISEGSDQGEQQFVAEVSIISNIRHRSVVQLQGWCHEQGQLILVYDYMPNGGLDQHLYASNCPLNWTMRYNVIVDLASALAYLHEKLEQCVIHRDIKASNVMLDRDFKGRLGDFGLAKSSARDMVAATTKLAGTMVYMAPELPITFKPTTESDVYSFGILALEVICRRRPFDGTVILLDWVWEKHEQGELLQVVDPGLNQAFDRTQAQVALSVALMCANPNPNERLRMQMARQMLIGEVSVPPLPANRPFMLYSNVNSEQGSCNNSGFHSDAWNTAAIENGRVTIIQRPEMNPR

SEQ ID NO: 200 - protein, 825 aa, Physcomitrella patens
MSTTTVSEDAEDGRGGRNGQQANQGRLWDMDQRIDQPLGAEADHVRSMYRDQTMPPSVVLCLAFQSLGVVYGDLGTSPLYVFKSTFANGGVRNEDDIIGALSLIIYTLTIIPLIKYVFIVLRANDNGEGGSFALYSLLCRYCNISALPNQHPSDAELTTYVVDNARRKTWIQRKLESSVLAQQVLLVIVLFGTCMVIGDGILTPSISVLSAVVGIKAASSSLDTNLVTGISCVILVILFSVQRFGTAKISVLFAPIFLVWFLSLACIGCYNIIKWEKSIFLAFNPLQIVHFFRRNGRQGWEHLGGIVLCMTGTEALFADLGHFSCRSIQIVFTSLVYPCLFLTYLGQAAYLVEHMEDVNDPFYSSLPSSIYWPIFVLATISAMIASRAMISATFSIVKQATALGCFPRVKVVHTSNNVAGQVYIPEINWILMVLCLCVTAGFRDTDQIGNAYGIAVVMVMIVTTLLMTLVIIIIWRKHFLLALLFLVVFASIEGIYVSAVLFKTTQGGWVPLVISVVFGTVMGTWHYGTLKRYQYEMQHKVSVGWLLGLGPSLGLVRVPGIGLMYTDLAHGVPPLFSHFITNLPAIHSTVVFVCVKYLPVNTVPQDERFLIRRIGSRAYSMYRCAARYGYIDLHKKDDNFEQLLIQSLISFVEIESMRESSGRESMAASWTPDQQPMEEATVPTTSTITPNRLQLQRMLRLHSLMGGGNSVGDGYSTQYSQTASNSVEMSANQECSIPNLSVNGSNSSSSPHPQDEVAFLNACKDAGVVYILGNNIVKARKDAGFFKKLVINYMYTFLRRISRDSSVVLNIPHECLLHVGMVYYV

SEQ ID NO: 201 - protein, 306 aa, Oryza sativa
MPSHADLERQIEQLMECKPLSESEVKALCDQARAILVEEWNVQPVKCPVTVCGDIHGQFYDLIELFRIGGNAPDTNYLFMGDYVDRGYYSVETVTLLVALKVRYRDRITILRGNHESRQITQVYGFYDECLRKYGNANVWKYFTDLFDYLPLTALIESQIFCLHGGLSPSLDTLDNIRALDRIQEVPHEGPMCDLLWSDPDDRCGWGISPRGAGYTFGQDIAAQFNHTNGLSLISRAHQLVMEGFNWCQDKNVVTVFSAPNYCYRCGNMAAILEIGENMDQNFLQFDPAPRQIEPDTTRKTPDYFL

SEQ ID NO: 202 - protein, 518 aa, Oryza sativa
MDASAGGGGNSLPTAGADGAKRRVCYFYDAEVGNYYYGQGHPMKPHRIRMTHALLAHYGLLDQMQVLKPHPARDRDLCRFHADDYVAFLRSVTPETQQDQIRALKRFNVGEDCPVFDGLYSFCQTYAGGSVGGAVKLNHGHDIAINWAGGLHHAKKCEASGFCYVNDIVLAILELLKYHQRVLYVDIDIHHGDGVEEAFYTTDRVMTVSFHKFGDYFPGTGDIRDIGHSKGKYYSLNVPLDDGIDDESYQSLFKPIMGKVMEVFRPGAVVLQCGADSLSGDRLGCFNLSIRGHAECVRFMRSFNVPLLLLGGGGYTIRNVARCWCYETGVALGHELTDKMPPNEYFEYFGPDYTLHVAPSNMENKNTRQQLDDIRSRLLDNLSKLRHAPSVQFQERPPEAELPEQDEDQEDPDERHHADSDVEMDDVKPLDDSGRRSSIQNVRVKRESAETDAADQDGNRVAAENTKGTEPAADGVGSSKQTVPTDASAMAIDEPGSLKVEPDNSNKLQDQPSVHQKT

SEQ ID NO: 203 - protein, 470 aa, Brassica napus
METDESGVSLASGPDGRKRRVSYFYEPTIGNYYYGQGHPMKPHRIRMAHSLIVHYNLHRRLEISRPYLADAADIGRFHSPEYVDFLRSVSPESVGDSSARNLRRFNVGEDCPVFDGLFEFCRASAGGSIGAAVKLNRQDADIAINWGGGLHHAKKSEASGFCYVNDIVLGILELLKMFRRVLYIDIDVHHGDGVEEAFYTTDRVMTVSFHKFGDFFPGTGHIRDVGAEKGKYYALNVPLNDGMDDESFRSLFRPLIQKVMEVYRPEAVVLQCGADSLSGDRLGCFNLSVKGHADCLRFLRSYNVPLMVLGGGGYTIRNVARCWCYETAVAVGVEPDNKLPYNEYFEYFGPDYTLHVEPGPMENLNTPKDMERIRNTLLEQLSGLIHAPSVPFQHTPPVNRVLDEPEEDLEKRPKPRIWSGTANYESDSDDDEKPLGGFSGINGPTMDRDSTGEDEMEDDSAEPEVDPPSS

SEQ ID NO: 204 - protein, 306 aa, Physcomitrella patens
MPSYADVDRQIEQLSECKPLSELEVKNLCDQARTILVEEWNVQPVKCPVTVCGDIHGQFHDLIELFRIGGKAPDTNYLFMGDYVDRGYYSVETVSLLVALKVRYRDRITILRGNHESRQITQVYGFYDECLRKYGNANVWKYFTDLFDYLPLTALIEHEIFCLHGGLSPSLDTLDHIRALDRIQEVPHEGPMCDLLWSDPDDRCGWGISPRGAGYTFGQDIAEQFNHTNGLSLVARAHQLVMEGYNWCQDKNVVTVFSAPNYCYRCGNMAAIMEIDETMNRSFLQFEPAPRQSEPDVTRKTPDYFL

SEQ ID NO: 205 - protein, 626 aa, Physcomitrella patens
MEELASSDVPNKLKKKESKMKKRVITPGALLKAVVRSGEGTKRPVEGDQIIFHYVTRTNQGVVVETSRSDFGGKGVPLRLVLGKSKMIAGWEEGITTMAKGEIAMLKVQPELHYGDPECPVPVPENFPVSDELLYEVELFNFCKAKIITEDLGVTKVVLEEGEGWETARPPYEVKLWITGRILGGSTFFTHKECDPIHVEFGKEQLPEGLEKAVGTMTRKEKSIIYISSSYCTNSSNAYKLNISPQAQELEFEVQLVQLIQVRDMFGDGGLIKRRLRDGLGEFPVDCPLQDSVLRVHYKAMLPDDGGRIFIDTRSNGGEPVEFASGEGVVPEGLEASLRLMLPGELALINSVSKYAYDKFQRPESVPEGASVQWEVELLEFESAKDWTGLNFQEIMAEADSIKTTGNRLFKEGKHELAKAKYEKVLRDFRHVNPGSDEEAKELQDTNNALRLNVAACYHKLHEYIKCIETCNKVLEGNPHHVKGLFRRGTAYMETGDFDEARADFKQMITVDKAVTVDATAALQKLKQKEREAELKAKKQFKGLFDLKPGELSEGLEEVKPVSEIHEKTVVNEELPIASMDQHQHSKHETEEGSHESPRASSRLLRLLKGGEHLIRTVTFGKCTIL

SEQ ID NO: 206 - protein, 429 aa, Linum usitatissimum
MKSKDKISYFYDGDVGSVYFGPNHPMKPHRLCMTHHLVLSYDLHKKMEIYRPHKAYPVELAQFHSADYVEFLHRITPDTQHLYRTDLARYNLGEDCPVFENLFEFCQIYAGGTIDAARRLNNQLCDIAINWAGGLHHAKKCEASGFCYINDLVLGILELLKYHARVLYIDIDVHHGDGVEEAFYFTDRVMTVSFHKFGDLFFPGTGDVKEIGEREGKFYAINVPLRDGIDDSSFNRLFKTIISKVVEIYQPGAIVLQCGADSLAGDRLGCFNLSIDGHAECVKFVKKFNIPLLVTGGGGYTKENVARCWTVETGVLLDTELPNEIPENEYIKYFGPDYTLKIPSRYIENLNSKSYLSSLKVQVMENLRYIQHAPSVQMQEVPPDFYIPDFDEDEQNPDERMDQHTRDKQVQRDDEYYDGDNDNDPTDRS

SEQ ID NO: 207 - protein, 684 aa, Glycine max
MDLESVIHRNTIKEESWKTVLTLAYQSLGVVYGDLSTSPLYVYKSAFAEDIQHSDTNEEIYGVLSFVFWTLTLIPLLKYVFIVLRADDNGEGGTFALYSLLCRHARVSLLPNTQLADEHLTEYTMDNGTVPVNRKNVGLGLKNLLEKHRVLQRVLLVLALIGTCMVIGDGVLTPAISVFSAVSGLELSMSKEQHRYVEVPVACVILIFLFALQHYGTHRVGSLFAPVVLTWLLCISAIGVYNIFHWNPHVYEALSPYYMFKFLKKTQKGGWMSLGGILLCITGSEAMYADLGHFSQLSIKIAFTFLVYPSLILAYMGQAAYLSRHHSLESDYRIGFYVSVPVKLRWPVLAIAILQAVVGSQAVITGTFSIIKQCSAMGCFPKVKIIHTSSKMHGQIYIPEINWSLMLLCLAITVGFRDTKRMGNAAGLAVITVMLVTTCLMSLAIVLCWHKNILLAVCFIVFFGSIEALYFSASLIKFLEGAWVPIALSLIFLIAMYVWHYGTLKKYEFDVHNKVPINWLLSLGPSLGIVRVKGIGLIHTELVSGIPAIFSHFVTNLPAFHQVVIFLCIKSVQVPHVRPEERFLVGRVGPKEYRLYRCIARYGYHDIHKDDIEFERDLICSIAEFIRSDASEYGLGFGSFEEDTKMTVVGTSASNLEGSIRMTEDDDQVDSQMEGPSELMEVKS

SEQ ID NO: 208 - protein, 334 aa, Glycine max
MLKHDTGNGVFDTGMDPGFLEVLEKHPENSDRVKNLVSILKRGPISPYISWHLGTPAKIPELFSFHTPEYINELVEVDKEGGKQLCGGTFLNPGSWDAALLAAGTTLSAMKHLLNGDGKVSYALVRPPGHHAQPSLADGYCFLNNAGLAVQLALDSGCKKVAVIDIDVHYGNGTAEGFYRSNKVLTISLHMNHGSWGPSHPQSGSVDELGEGEGYGFNLNIPLPNGTGDKGYVHAFNELVVPSIQKFGPDMIVLVLGQDSNAFDPNGRQCLTMEGYREIGRIVHLLAKRHSAGRLLIVQEGGYHVTYSAYCLHATLEGILNLPMPLLADPIAFT

SEQ ID NO: 209 - protein, 638 aa, Brassica napus
MAARVEAATMGGGEIDEESDERGSMWDLDQKLDQSMDEEAGRLRNMYKEKKFSALLLLQLSFQSLGVVYGDLGTSPLYVFYNTFPHGIKDPEDTIGALSLIIYSLTLIPLLKYVFVVCKANDNGQGGTFALYSLLCRHAKVKTIKNQHRTDEELTTYSRSTFHEHSFAAKTKRWLEDRTSRKTALLVLVLVGTCMVIGDGILTPAISVLSAAGGLRVNLPHISNGVVVLVAVVILVSLFSVQHYGTDRVGWLFAPIVFLWFLSIASIGMYNIWKHDTTVLKAFSPVYIYRYFKRGGIDRWTSLGGIMLSITGIEALFADLSHFPVSAVQIAFTAIVFPCLLLAYSGQAAYIRNHPHHVADAFYRSIPGSVYWPMFIIATAAAIVASQATISATFSLIKQALAHGCFPRVKVVHTSRKFLGQIYVPDINWILMILCIAVTAGFKNQSQIGNAYGTAVVIVMLVTTLLMTLIMILVWRCHWVLVLVFTVLSLVVECTYFSAMLFKVDQGGWVPLVIAAAFLLIMSVWHYGTLKRYEFEMHSRVSMAWILGLGPSLGLVRVPGVGLVYTELASGVPHIFSHFITNLPAIHSVVVFVCVKNLPVYTVPEEERFLVKRIGPKKLPHVPLRCKVWIWRLAQERR

SEQ ID NO: 210 - protein, 336 aa, Physcomitrella patens
MRVQCDVCEKNKAAVMCCADEAALCTSCDTRVHAANKLANKHVRVPLVGQLEPPRCDICQEKPGFFFCLEDRALLCRDCDVSIHSANKLSSNHQRFLLTGTRVGLDSISGQEGAEVVLEESPRVPTPSTATSTLPSISKSTLSSGSKLKDNSQPVPANATPTPNPSWLTNGGRNSERAKIKSKPVGTTSANVSDPHGSSFGKRNSIPADFLSDAVPVWGVDELLNLPELAEGYHIGDIGSSKADMNNLGDYDWMADLSMFEEQMYAAGSFHEVPQLSAPAPTVGLTRGGRATALSKGKGKQDAAIVPQFDDAFVVPDLGLSVSPSSPAPVTKRRRT

SEQ ID NO: 211 - protein, 239 aa, Physcomitrella patens
MTETTGSGALSQAADCLPLTYQRPVRDDLETHLPKPYLARALVAPDTEHPNGTLGHRHNGMTVLQQHIAFFDQNGDGIIYPWETYAGLREIGFNVIWSAMVAFIINVVMSYASLPGWLPSPFLPIYIYNIHKAKHGSDSGAYDTEGRYVPVYFENVFSKYARTVPDKLTLGEIWSMTEGNRVAYDFFGWAAAKGEWILLYMLAKDEEGMLSKEACRRCFDGSLFEYCAKMNRMQHEKAY

SEQ ID NO: 212 - protein, 358 aa, Physcomitrella patens
MPKPCDACHVSSAAVFCRADAAYLCVGCDGKVHGANKLASRHERVWMCEVCEVAPAVVTCKADAASLCVACDTDIHSANPLAQRHERVPVTPLFESASPLRGPDFCVLVSENGCHDLLKGCEDASVVEAVSWLLPHPKISTNSIIRGSAAADEMGSSPFHDRPFSPKPKKQKVELPADIFSDVDPFLDLDDATVTGIQPDSLVPVHMPECSEDTDSLAHSMDPSFTKFPLSAKSGYSYGTSTLTQSISCSSLDAAVVPDSSLSDISTPYLDSQSSQDMSARLPHQTGGPIDTVDREARVLRYKEKRQKRKFEKTIRYASRKAYAESRPRIKGRFAKRTDSDMEQFGSVDSSFGVVPSF

SEQ ID NO: 213 - protein, 431 aa, Physcomitrella patens
MPVKDRISYFYDGDVGSVYYGPNHPMKPHRLCMTNSLVLAYGLHNKMEIYRPHKAYPVELAQFHSVDYVEFLGRITPESQEKYAAELIRYNMGEDCPVFDNLFEFCQIYAGGTIDAAHRLNHGLCDIAINWAGGLHHAKKCEASGFCYVNDLVLGILELLKYHARVLYIDIDIHHGDGVEEAFYLTDRVMTVSFHKFGDYFFPGTGDVKDVGEREGKYYAINVPLKDGIDDANFIRMFRVVIQKVVEVYQPGAIVLQCGADSLAGDRLGCFNLSIDGHSECVKFVKKFNIPLLVTGGGGYTKENVARCWTVETGVLVDTELPNEIPDNDYLKYFKPDCTLKTTSGNHMENLNGKTYLSTIKQQVMENLRRIAHAPSVQMHEVPPDTYIPEFDEDELNPDERMDQHTQDKHIQREEEYYEDDNDNDHDMDDS

SEQ ID NO: 214 - protein, 426 aa, Brassica napus
MRSKDKISYFYDGDVGSVYFGPNHPMKPHRLCMTHHLILAYGLHSKMEVYRPHKAYPIEMAQFHSPDYVEFLQRINPENKDLFPNEMARYNLGEDCPVFEDMFEFCQIYAGATIDAARRLNNKLCDIAINWAGGLHHAKKCDASGFCYINDLVLGILELLKHHPRVLYIDIDVHHGDGVEEAFYFTDRVMTVSFHKFGDKFFPGTGDVKEIGEREGKFYAINVPLRDGIDDSSFNRLFRAIISKVVEIYQPGAIVLQCGADSLARDRLGCFNLSIDGHAECVKFVKKFNIPLLVTGGGGYTKENVARCWTVETGILLDTELPNEIPDNDYIKYFGPDYSLKIPGGHIENLNTKSYISTIKAQILDNLRYIQHAPSVQMQEVPPDFYIPDFDEDERNPDVRVDQRSRDKQIQRDDEYFDGDKDNDAS

SEQ ID NO: 215 - protein, 417 aa, Glycine max
MHLLKFPRSPSSFGNAFFLVGHHVLDIRVFRKNQRCFRASISCSAVRNGSIEQLSDARLIYSVAPSMGHNQESHPESHFRVPAIVNALEEMQLTSKFRGPEVIELQHFEPASVDDIASVHARAYVSGLEKVMDQAVEKGLIFLDGSGPTYATATTFQESIVAAGAGLALVDSVVACSKIKGDAPTGFALIRPPGHHAVPQGPMGFCIFGNVAIAARYSQRVHGLKRVFIIDFDVHHGNGTNDAFYDDPDVFFLSFHQDGSYPGTGKFDEVGSGDGEGTTLNLPLPGGSGDTAIRTVFDEVIVPCAQRFKPDIILVSAGYDGHVLDPLANLQYTTGTYYMLASSIKQLAKDLCGGRCVFFLEGGYNLKSLSYSVADTFRALLGDRSLASEFDNPNILYEEPSTKVKQAIQKIKHIHSL

SEQ ID NO: 216 - protein, 532 aa, Physcomitrella patens
MISGASGAPAGAPVPTATGSVAAPLPALEWKFSQVFGERAIGEEVQEVDIISAIEFDKTGEHLATGDRGGRVVLFERTDGKDQRTRRELERADSAGSRHPEYRYSTEFQSHEPEFDYLKSLEIEEKINKIRWCQTANAAQFLISTNDKTIKLWKVTEKKVKQVKNLNVDPGARGNGNPLSNNMMLNPKGFAPRLSMNGVAANRSTPAISPDFVFPPGGIPSLHLPSVWSNETALVARCRRAYANAHAYHINSISNNSDCETYISADDLRINLWNLEVSDQSFNIVDIKPTNMEDLTEVITSAEFHPSHCNVLAYSSSKGSIRLIDMRQSALCDRHSKLFEETEHAGSRSFFTEIIASISDIKFARGGRYILSRDYMTLKLWDVNMESSPVAVFKVHEYLRPKLCDLYENDSIFDKFECCLSGDGMRVATGSYSNLFRVFGAATGSEEASTLEASKTPNRRIVTPPSKAGSRLANLARGRRDNRRGGESPGIDLNGGVQDFTSKLLHLAWHPAANVIAFALARCSLHPTACTC

SEQ ID NO: 217 - protein, 343 aa, Physcomitrella patens
MASEGVLLGMGNPLLDISCVVDDAFLEKYGLTLNNAILAEDKHLPMYKELAANPDVEYIAGGATQNTIRIAQWMLGESNATSYFGCVGKDEYGDRMFKLASEGGVNIRYDVDEDLPTGTCGVLVVKGERSLVANLSAANKYKIDHLKKPENWAFVEKAKYIYSAGFFLTVSPESMMTVAKHAAETGKYYMINLAAPFICQFFKDPLMELFPYVDFIFGNESEARAFAQVQGWETEDTKVIAVKLAALPKAGGTHKRVAVITQGTDPTIVAEDGKVTEFPVTPIPKEKLVDTNAAGDSFVGGFLSQLVLGKDIAQCVRAGNYAASVIIQRSGCTFPSKPSFESQ

SEQ ID NO: 218 - protein, 191 aa, Physcomitrella patens
MAFSGTTQKCKACEKTVYLVEQLTADGVVYHKSCFRCNHCKGTLKLANYASLEGVLYCKPHFEQLLKVTGSFDKSFEHKPSEGLKKAEKGENKAPSKASLMFSGTQEKCIACSKTVYPIEKTTVEGLPYHKQCFKCVHGGCTISPSNYAALEGRLYCKPHYSQLFKEKGNYSQLTKAPALKVAASQAITES

SEQ ID NO: 219 - protein, 449 aa, Physcomitrella patens
MTTATPSIPATNVERTRVGKYDLGKTLGEGTFAKVKVAKHIDTGHTVAIKILDKDKILKHKMVEQIKREISTMKLVKHPYVVQLLEVMASRTKIYIVLEYVTGGELFNKIAQQGRLSEDDARKYFQQLIDAVDYCHSRQVFHRDLKPENLLLDAKGSLKISDFGLSALPQQFRADGLLHTTCGTPNYVAPEVIMDKGYSGATADLWSCGVILYVLMAGYLPFEEPTIMALYKKIYRAQFSWPPWFPSGARKLISKILDPNPRTRISAAEIYKNDWFKKGYTPAQFDREADVNLDDVNAIFSGSQEHIVVERKESKPVTMNAFELISLSSGLNLSSLFETKEIPEKEDTRFTSKKSAKEIISSIEEAAKPLGFNVQKRDYKMKLQGDKLGRKGHLSVSTEVFEVAPSLYMVELQKNSGDTLEYNHFYKNLSKGLKDIVWKADPLPACEQK

SEQ ID NO: 220 - protein, 91 aa, Physcomitrella patens
MPQIQYSEKYFDDTYEYRHVVLPPDIAKLLPKNRLLSEAEWRGIGVQQSRGWVHYAIHRPEPHIMLFRRPLNYGQPQQAAAVQQQPTGMKA

SEQ ID NO: 221 - protein, 412 aa, Physcomitrella patens
MMEAEQSYVQKLESLLGGVSTLVREEEETASVSEDEDDSNSLPQIQVAVKSKRKGERRKRRERALERAEKVATDLASAPPLPKPKKPQLAADPSDPVRAYLRDIGRTKLLTAREEVDLSHQIQDLLKLENIKSNLEREIGRNATIGEWSRAVGMEQNAFEARLKKGRFAKDKMVNSNLRLVVSIAKNYQGRGMTLQDLIQEGSMGLVRGAEKFDPTKGFKFSTYAHWWIRQAVTRSIADQSRTFRLPIHLYEVISRINKAKRMLVQEHGREARNEEVAELVGLTVEKLKSVVKSAKAPGSMERPIGKDGDTTLGELVADTDVDSPEDAIVKQLMRQDIEGVLRTLNPREREVLRLRFGLDDGRSKTLEEIGQIFKATRERIRQIEAKAMRKLRQPSRNSILREYLDVKSDAI

SEQ ID NO: 222 - protein, 469 aa, Physcomitrella patens
MKELNEDMEIPLGRDGEGMQSKQCPRGHWRPAEDDKLRELVSQFGPQNWNLIAEKLQGRSGKSCRLRWFNQLDPRINRHPFSEEEEERLLIAHKRYGNKWALIARLFPGRTDNAVKNHWHVVTARQSRERTRTYGRIKGPVHRRGKGNRINTSALGNYHHDSKGALTAWIESKYATVEQSAEGLARSPCTGRGSPPLPTGFSIPQISGGAFHRPTNMSTSPLSDVTIESPKFSNSENAQIITAPVLQKPMGDPRSVCLPNSTVSDKQQVLQSNSIDGQISSGLQTSAIVAHDEKSGVISMNHQAPDMSCVGLKSNFQGSLHPGAVRSSWNQSLPHCFGHSNKLVEECRSSTGACTERSEILQEQHSSLQFKCSTAYNTGRYQHENLCGPAFSQQDTANEVANFSTLAFSGLVKHRQERLCKDSGSALKLGLSWVTSDSTLDLSVAKMSASQPEQSAPVAFIDFLGVGAA

SEQ ID NO: 223 - protein, 594 aa, Physcomitrella patens
MESEDEMQDAWAGTSDGEFVNEEEDEESDALASDDDNDESDYGFDYSNVDDLHPSSRLPQTNFTILSEKDIRQRQDEAVSTITNFLSISPADAGVLLRHFKWSVSKVNDEWFADEERVRASVGLLEKPATSKRQTQTEMTCEICFEVHPFEKMRAPRCGHYFCETCWTGYIHTAINDGPGCLTLRCADPSCGSAIGEDMVLSLVSTDDQQKYMRYLLRSYVEDNRKVKWCPAPGCEYAVEFQPGVGSYDLVCKCGFNFCWNCREEAHRPVDCETVNKWILKNCAESENMNWILANSKPCPKCKRPIEKNQGCMHITCTPPCKFEFCWLCLGAWTDHGERTGGFYACNRYETAKQEGVYDEAERRREMAKNSLERYTHYYERWATNESSRAKALADLQDMQNVQIEKLSVTQCQPVSQLKFVTDAWLQIVECRRVLKWTYAYGYYLPENEHTKRQFFEYSQGEAEAGLERLHQCAEKDLLTFLGGTPTSSFNDFRTKLAGLTSVTKTYFENLVRALENNLSDVDIPKAAAKSSSSSKASGSSKGRGGRPKVGSSKSGGSSRSGEESTHWSCEHCTYANTTAASSIVCVICNHARS

SEQ ID NO: 224 - protein, 376 aa, Physcomitrella patens
MDVAGAGGGGAADGNIQGVPTHNGEYTQYNIFGNLFEVSRKYVPPIRPIGRGAYGIVCSAVNSETGEEVAIKKIGNAFDNRIDAKRTLREIKLLRHMDHENIVAIRDIIRPPTRENFNDVYIVYELMDTDLHQIIRSNQPLTEDHCQYFLYQLLRGLKYIHSAKVLHRDLKPSNLLLNANCDLKICDFGLARTTSETDFMTEYVVTRWYRAPELLLNCSEYTAAIDVWSVGCIFMELLNREPLFPGRDYVQQLRLITELIGSPEDHDLGFLRSDNARRYIRQLPRFARQPLDRKFPNMGPAAIDLVEHMLRFDPARRITVEEALAHPYLATLHDINDEPICHSPFEFDFEQPSFTEEHIKELIMMEAIAVQPWECG

SEQ ID NO: 225 - protein, 590 aa, Physcomitrella patens
MGNCCKKSSVAEEATRKYKAPEQWITKNEPSAQTHQQKPQNGATHTKPRSRKPPPGVVHSRNRSKKVEKLAESKQPEPWKSPPESTADRKKKPRVRAAINGKDNKEMAPLGKRTNFGYGRDFKSKYTLGKLLGHGQFGYTYVAIEKSTGSRVAVKTIEKKQMTLPISVEDVKREVKILRTLSGHENVVQFYASFEDDDLVYIVMELCEGGELLDRILAKKDSRYSEKDAAKIVRQMLNVAARCHLNGVVHRDMKPENFLFKSTSEDSPLKATDFGLSDYIRPGNRFHDVVGSAYYVAPEVLKKKSGPESDVWSIGVITYILLCGRRPFWDKTEKGIFDEVLKKNPDYGEKPWPTISSSAKDFVKKLLVKDPAARLTAAQALSHPWAKEGGDALDIPLDISVLSNMREFVKYSRLKQLALRALASTLDSSDIADLQDQFNAIDIDRNGKITLEEMREALQKDRPWSIQESRIVEILQAMDSNSDGLVDFDEFVAATLHVHQLEETDSEKWQSRSQAAFSQFDFDGDGYITADELKIATGLNGSMDSILVEADIDGDGKISLSEFQKLLRQASLGSRTNEHHTLVTHNHRKC

SEQ ID NO: 226 - protein, 357 aa, Physcomitrella patens
MMSPTCRRSGSVRARVTTGNCVERIGKIARFVTLLLIFAVWIELAAAHGGAADEATPEDGPPPNLRAKGLILVKVYCLIIVFFVTLLGGISPYFVPWNASFLVLGTQYAAGVFLTTALLHFLSDAHNIFQALTTKQYAFAEMLAIAGYLITLFGDLIIQRLILRGARSSAQLGSLDGEKDGAAKLDEKGRAEVNATLLHRASFGDTLLLILALCFHSVFEGIAIGVSVTKQDAWKAFWTITLHKVFAAIAMGIALLRMLPNRPLLSCFCYSFAFAISTPIGIAIGIIIDATTEGAVADWIYAIAMGLATGVFIYVAINHLLGKEYMPSKTSVEQPFKKFIALTLGAATMAIVMIWDA

SEQ ID NO: 227 - protein, 698 aa, Physcomitrella patens
MASATAATMASLLTPGSLRRGLGSQESSTQFAPLAGPRKTSVSRRVTASASGKNDNGVVEDVDMGKRGMLKGVAGALAAVLPAVIAKKASAAEEQGVASSRMSYSRFLEYLDMDRVKKVDLYENGTIAIVEAVSPELGNRVQRVRVQLPGTSSELLSKFRSKNVDFAAHSPQEDSGSVILNLIGNLAFPLLLVGGLFFLSRRSQGGMGPGGPGNPMAFGKSKAKFQMEPNTGITFQDVAGVDEAKQDFMEVVEFLKRPERFTAVGAKIPKGVLLVGPPGTGKTLLAKAIAGEAGVPFFSISGSEFVEMFVGVGASRVRDLFKKAKENAPCIVFVDEIDAVGRQRGTGIGGGNDEREQTLNQLLTEMDGFEGNTGVIVIAATNRADILDAALLRPGRFDRQVSVDVPDVKGRTDILKVHASNKKFADDVSLDIIAMRTPGFSGADLANLLNEAAILTGRRGKTAISAKEIDDSIDRIVAGMEGTVMTDGKSKSLVAYHEVGHAICGTLTPGHDAVQKVTLIPRGQARGLTWFIPGEDPTLISKQQIFARIVGALGGRATEQVVFGDAEVTTGASSDLQQVTSMAKQMVTVFGMSDIGPWALMDPSSQGGDMIMRMMARNSMSEKLAEDIDKAVKAISDEAYEVALGHIRNNRTAMDKIVEVLLEKETLSGAEFRAILSEYTEIPAENRVSDNQAAPVAV

SEQ ID NO: 228 - protein, 257 aa, Physcomitrella patens
MTELREENVYMAKLAEQAERYDEMVEAMENVVKAVENEELTVEERNLLSVAFKNVIGARRASWRIISSIEQKEEAKGSEEHVAAIKEYRSKVEAELSTICDTILKLLDSHLIPSSTSGESKVFYLKMKGDYHRYLAEFKAGAERKEAAEATLHAYKHAQDISTTELASTHPIRLGLALNFSVFYYEILVSPDRACHLAKQAFDEAISELDTLGEESYKDSTLIMQLLRDNLTLWTSDMQDDIGEEGKDSKVEDADDH

SEQ ID NO: 229 - protein, 308 aa, Physcomitrella patens
MSVSGMDNYEKLEKVGEGTYGKVYKARDKRSGQLVALKKTRLEMEEEGVPSTALREVSLLQMLSHSMYIVRLLCVEHVEKGSKPMLYLVFEYMDTDLKKYIDLHGRGPSGKPLPPKVVQSFMYQLCTGLAHCHGHGVMHRDLKPQNLLVDKQTRRLKIADLGLGRAFTVPMKSYTHEIVTLWYRAPEVLLGATHYSLPVDIWSVGCIFAELVRKMPLFTGDSELQQLLHIFRLLGTPNETIWPGVSQHRDWHEFPQWRPQDLSLAVPGLSAVGLDLLAKMLVFEPSKRISAKAALSHTYFADVDKTAT

SEQ ID NO: 230 - protein, 397 aa, Physcomitrella patens
MEGTSENSPVVEKPETNERTEGNVKVAKNPGDSAVLHKKNSMVRADLVNLADLDTALNRVHNKLPNSIETASAEPPAPPEEWEINPREITLKHMIARGTFGTVHKGVYKGQDVAVKLLEWGEENTMKKTEVQYYRNQFRQEVAVWHKLDHPNVTKFIGASMGNSDLRIPSAVDGDDGFHHVPNNACCVVVEYLAGGTLKDHLIRSRRKKLSYKVVVQLALDVSRGLAYLHSQKIAHRDVKTENMLLDKQMRVKIADFGVARVEASNPKDMTGDTGTPGYMAPEILDGKPYNKKCDVYSFGICLWEVYCCDMPYLDLSFADMTSAVVHQNLRPEVPKCCPQGLADIMRQCWDANPEKRPAMADVVQMLEALDTSKGGGMIPTDAQPHGCLCFGRFKGP

SEQ ID NO: 231 - protein, 337 aa, Physcomitrella patens
MSTEGGLHVLDGSQIRNALPDLQSRNSFSKNDEGSKGYLTPSEMRQAAEAEAAALLLGVQLSSKIFENAASKLPTEDSAEITEDVFSSTLQSYLTAIADALEDEPVVVSVLDGSAIKALLEDEDDFAMVAEDLFEKLDTDESGKLSSKELRPAIMQLGVEQGVPPAAATTEAEELVTKLINKYGQGTEELGQAQFAALLQDVLQDMAESLAEKPITIVRDVKMLNGSHLRKMLADEKAFKEMADNMFNDLDVNKDQRLSKAEIRPLFEQQTAAWGLPPVGDSDTEELFDEVFKAVDSDKSGEVEKPEFAVLVKTLLADFAETLRLNPILVEIETASR

SEQ ID NO: 232 - protein, 333 aa, Physcomitrella patens
MSKARVYTDVNVQRPKDYWDYEALTIQWGDQDDYEVVRKMGRGKYSEVFEGINTVNNERCVIKILKPVKKKKIKREIKILQNLCGGPNIVKLFDIVRDQQSKTPSLVFEYVNNLDFKVLYPTLTDYDIRYYIHELLKALDYCHSQGIMHRDVKPHNVMIDHEQRKLRLIDWGLAEFYHPGKEYNVRVASRYFKGPELLVDLQDYDYALDMWSLGCMFAGMIFRKEPFFYGHDNYDQLVKIAKVLGTDELYAYLNKYRLELDPHLEALVGRHSRKPWSKFLNSDNQHLVAPEAVDFLGKLLRYDHQERLTAREAMAHPYFYPVRSMEASNRRST

SEQ ID NO: 233 - protein, 732 aa, Physcomitrella patens
MLGSSKVVAMNGEAKKFVRFRPLESQVSMGSDPKTPLRSSFSVDSSGVATGRRGWQRSSKGFFKLGQSLKFKSSSQEYDEDMPKDLQWKTLDPSSPSLYKWNTFFLVSCLVAIFVDPLFFYLPKVDYSNSCIRISRDLQASVTVFRTISDFFYVVHMVLRFRTAFVRPSTRVFGRGELVTDPREIAIRYLKFDFWIDFVAVLPIPQVVIWLVVPHVDGVTSLNINTKDALRYIVVFQYVPRMLRIFPLLSKMINSTGVLLETAWAGAAFNLILYMLASHILGATWYLLSVERQDTCWTDVCLRNAPDKALCRREIFDCAWQGAAVNAWYGNFTTDSNVFCNYIAVPMGADTFNYGIYNNAISNTISSSDLAFSQTYFFCLWQGLLALSSLSQTLNVSTFVGEIIFTIIIIIVGLFLFAFLIGNMQTYLQSLTLRLEEMRVKRRDTEQWMRHRNLPHDIVQRVRRYDQYKWVATRGVDEETLVQSLPSDLRRDIKRHLCLRLVRNVPFCDQMDESLLDAMCERLRPALCTEGTHILREGDPVNEMFFVIRGELKSETTNGGRTGFYNKAVLSSGDFCGEELLTWALDPKPQSHLPTSTSSVKALKEVEAFSLSSDDLKFIASQFRRLHSKQLQHTFRYYSNHWRTWGACFIQAAWRRYQRRRLAELRRKEEDQYLSLQGEPTDRISLGATILAGRFAKNAMRGVQRLRSMHAAELARISNIPKPSESDFSQDN

SEQ ID NO: 234 - protein, 303 aa, Physcomitrella patens
MGSSKAEENLALRLGLTAASAMASESVTFPIDITKTRLQLQGEMGATAGAPKRGAISMAISIGKEEGIAGLYRGLSPALLRHVFYTSIRIVAYENLRTALSHGEHPENLSVAKKAFIGGTSGIIGQVIASPADLVKVRMQADGRLVKLGQQPRYTGVADAFTKIARAEGVTGLWRGVGPNAQRAFLVNMGELACYDQSKQWIIGRGIAADNIGAHTLASVMSGLSATILSCPADVVKTRMMNQGAAGAVYRNSLDCLTKTVKAEGVMALWKGFFPTWTRLGPWQFVFWVSYEQLRRISGLSSF

SEQ ID NO: 235 - protein, 268 aa, Physcomitrella patens
MASKYPRKCREHASPGVGGRESTHRFDSRSQSYSFSEKPYHRRRRDAFRDMISDLVHQPSDTAVPGFRGVRYRQKLNKYVTEIRPTRCSKKIWLGTYDTAEEAARAFDIGNLCCKKNLPLNFPDSTQMLQRISSKLTPEAQRKAIATLAKDVVRMENDRSKLGGGNLTTTEPPVHSEPITQHLAAAEIRAVTYIEQPLEIVYGVEESATAMSVTEANARDNHSWSWDLGKVILDDELSEIPNFVGELDHEAMDFSSHGEVYYHHYDSQ

SEQ ID NO: 236 - protein, 281 aa, Physcomitrella patens
MGRGKIEIKKIENTTSRQVTFSKRRGGLLKKAHELAVLCDAEVALVIFSSTGKHFEFASSGSMRDIIERYRKSSDGAVKRGTNTDLLGREVIKLKQQVERLESSQRHMLGEDLSALKVSDLLELEQQLDQGASRVRARKNQLILEEIEDLRRKEHELMIANEALRKKIADAEGAAEAAARANFPDARLESPKPFASDFSRDMSVSSQLAASVYPHPNLLQAQRSQTSLQLGWLSEQQIPSTEEGCAGESSLKWDHPHFHIQNRLHANISPSVRIYKLHVDR

SEQ ID NO: 237 - protein, 360 aa, Physcomitrella patens
MSPSVDCLASLYCAEDVSGTAWNESEMCGAADRVFESQPAVFMDFPVEDDEAIATLLMKEAQFMPEADYLERYQSRKLSLEARLAAIEWILKVHSFYNYSPLTVALAVNYMDRFLSRYYFPEGKEWMLQLLSVACISLAAKMEESDVPILLDFQVEQEEHIFEAHTIQRMELLVLSTLEWRMSGVTPFSYVDYFFHKLGVSDLLLRALLSRVSEIILKSIRVTTSLQYLPSVVAAASIICALEEVTTIRTGDLLRTFNELLVNVESVKDCYIDMRQSEIGPYCVRMGLKRKILHASEPQSPVGVLEAADVSSPSGTVLGFSSRESSPDVTDSPPSTNSQRKRRKLSLHNESCLHVESASL

SEQ ID NO: 238 - protein, 774 aa, Physcomitrella patens
MAGSKHERSGDSPVGTGEVSPLAAQLQQAWLQTQMPKAQKRSFTSVANAQNQLPRLSPPGPGSEMSASSKPPSSSVLKSLSTLFPELANVQEKKEAKISSVFEEGEQPIPIHPELRQKKAECLEVMFGQDVVEQTQAQGLRDYDRHASTERSLSDSLIQQSDDSLDFSDLGPLSVSNSFSRPSAQPGRGTFEDDLSYICSAYGSRPSASEYETSAEVEQEKTPLFEYLTDILMDENVEEKKCMFIEMSAYQAMAKELGDLISYDPPPMPIPETRRSDPHFEEDVRFVDSWIDEILSGPLPADRTDSPGAEAKLDIKHGSSPEELYSHTDADRGSSVWNDTASDTASYLHPDSTLSPVDFGNSHALENGSGGSLQVGTRHLSSISSSNGNGVHAPPVDLTDLLIRCAQAVEQADYRHANELIHELRHHSSAYGNGSQRMAHYFMEALVAKISGTGGQLYSALSNYRPSEAQMLRAQMLFCEHCPFIQVPHIYANHAIMVAFKGAPRVHIIDYGILYGIQWLCLIHQLSQRPEGPPHLRITGIDRPQPGFRPSARIQDTGRRLAKLAKQMGVPFEFHAIAEKWEAITPAHLLLRDDEVLAVNSMFRFRHLLDESVTAASPRNLVLSRIRSLNPKIFVQGVLNAGYNAPFFMSRFREALAYFSTIFDSMECSFPAEHPDRQIIDHEIVGREILNVVACEGPERVERSETYRQWQARTMRAGFQQKPNSPNVMAKIRMAMRSYHRDYGIGEDGAWFLLGWKERITHAMTVWEPLPDSP

SEQ ID NO: 239 - protein, 188 aa, Physcomitrella patens
MATERVSQETTSQAPEGPVMCKNLCGFFGSQATMGLCSKCYRETVMQAKMTALAEQATQAAQATSATAAAVQPPAPVHETKLTCEVERTMIVPHQSSSYQQDLVTPAAAAPQAVKSSIAAPSRPEPNRCGSCRKRVGLTGFKCRCGNLYCALHRYSDKHTCTYDYKAAGQEAIAKANPLVVAEKVVKF

SEQ ID NO: 240 - protein, 473 aa, Physcomitrella patens
MEPRVGNKYRLGRKIGSGSFGEIYLGTNLVTHEEVGIKLESIKAKHPQLLYESKLYRILQGGTGIPNIRWYGIEGDYNVMVLDLLGPSLEDLFNFCSRKFSLKTVLMLADQLINRVEYVHAKSFLHRDIKPDNFLMGLGRRANQVYMIDFGLAKKYRDPTTHQHIPYRENKNLTGTARYASINTHLGIEQSRRDDLESLGYVLMYFLRGSLPWQGMKAGTKKQKYEKISEKKMSTPIEFLCKAYPSEFASYFHYCRSLRFDDKPDYAYLKRIFRDLFIREGFQFDYVFDWTILKYQQTHFSGGPLRPAAAAGGSSGAAAAAAAGIGTVPRDAQRAIEPTDVAARTRMVGATRSSGLNPLDASKHKSTSPDEAASKDIALSGLAEPERTHASSFVRGSSSSRRAVVGCARPAGSTEAGDGTRVLAGKMGPTSLRTSAGMQRSSPVASTDPKRTGRDSYAGNSGRNPSSSRNSKE

SEQ ID NO: 241 - protein, 337 aa, Physcomitrella patens
MVVAVAVLFAVVLFILCLHIYAKWFWRNQGAIVASDGTLRTLSWRRRRYTVPVNATPVTQAVGLERAVIEALPTFEFDGERAKRVFECAVCLEEFELGEKGRTLPKCDHSFHLDCIDMWLHSHSTCPLCRTSVGADETEKKTEAATVMQISEPPQMEAPVMGDVGAPFMAAMRASRRSQRSRGQLPALNSSPRGNSLPRTAEDQGGENHRRSGTSETAVAVDQQQNIKDYETPSGIPSNVLFWGNHAQMSSAGAGGSAEARAASSIRAPFQVTIDIPRSGPAAVSNSSNVLSPMARASASFRRLLSRGKSVVSPQTGEDGVDEGGPSSSPRPPPPHA

SEQ ID NO: 242 - protein, 192 aa, Physcomitrella patens
MFLVDWFYGFLASIGLWQKEAKILFLGLDNAGKTTLLHMLKDEKLGQHQPTQYPTSEELSINRVKFKAFDLGGHTIARRVWRDYYAKVDAIVYLVDAVDRERFAESKKELDSLLSDDSLSQVPVLVLGNKIDIPYASSEDELRFTLGLTMTTGKGTVNLGDSNIRPIEVFMCSIVRKMGYGEGFKWMTQYIK

SEQ ID NO: 243 - protein, 191 aa, Triticum aestivum
MAGKGGPENSNCAYRGVRQRTWGKWVAEIREPNRGNRLWLGSFPTAVEAARAYDDAARAMYGAKARVNFSEQSPDASSGCTLAPPLLMSNGATAASHPSDGKDESESAGTVAHKVKKEVSNDLRSTHEEHKTLEVSQPKGKALHKEANVSYDYFNVEEVLDMIIVELSADVKMEAHEEYQDGDDGFSLFSY

SEQ ID NO: 244 - protein, 456 aa, Glycine max
MEPRVGNKFRLGRKIGSGSFGEIYLGTNIQTNEEVAIKLENVKTKHPQLLYESKLYRVLQGGTGIPDVRWFGVEGDYNVLVMDLLGPSLEDLFNFCSRKLSLKTVLMLADHMINRVEFVHSKSFLHRDIKPDNFLMGLGRRANQVYCIDFGLAKKYRDSSTHQHIPYRENKNLTGTARYASMNTHLGIEQSRRDDLESVGFVLMYFLRGSLPWQGLKAGTKKHKYERISEKKVSTSIEALCRGYPTEFASYFHYCRSLRFDDRPDYAYLKRIFCDLFIREGFQFDYVFDWTILKYQQSQLAAPPARAIGPNVGTSSAMPPAVTNADRQTGEEEGRPPGLVSGDSTRRRMSGPITNSVNISKQKNPVTTDAALNKEAMLSRPNVLGQSSGSRRAAVSSRRDAFVGSDLDLRTRSTEANPGTAIKTSSARNASHVKNYETAIKGIEGLQLENDEKAHY

SEQ ID NO: 245 - protein, 473 aa, Triticum aestivum
MDHIVGGKFKLGKKIGSGSFGELFLAVNVQTGEEVAVKLENVKTKHPQLHYESKLYMLLQGGTGIPHLKWFGVEGEYNVMVIDLLGPSLEDLFNYCSRKFSLKTVLMLADQMINRVEYMHQKGFLHRDIKPDNFLMGLGRKANQVYIIDYGLAKKFRDLQTHKHIPYRENKNLTGTARYASVNTHLGVEQSRRDDLESLGYVLMYFLRGSLPWQGLKAGTKKQKYDKISEKKMLTPVEVLCKSYPSEFISYFHYCRSLRFEDKPDYSYLKRLFRDLFIREGYQFDYVFDWTILKYPQIGSNPRMRPSERVSGAAGPSIEKIEKAPGEASARRNPSASLNQSDNHATRPRETVSMSLKEIMHSTDRSGERTVERTVERPRTSSRTGSASRRAVASSSRPGSSMEPSEQQYSRTSRLFSSSNNGGSRPSSTQRVNPGVGESRATSLSRAAVARGSRDEPLHRSLELLSLGTGKRK

SEQ ID NO: 246 - protein, 524 aa, Saccharomyces cerevisiae
MSQRSSQHIVGIHYAVGPKIGEGSFGVIFEGENILHSCQAQTGSKRDSSIIMANEPVAIKFEPRHSDAPQLRDEFRAYRILNGCVGIPHAYYFGQEGMHNILIIDLLGPSLEDLFEWCGRKFSVKTTCMVAKQMIDRVRAIHDHDLIYRDIKPDNFLISQYQRISPEGKVIKSCASSSNNDPNLIYMVDFGMAKQYRDPRTKQHIPYRERKSLSGTARYMSINTHFGREQSRRDDLESLGHVFFYFLRGSLPWQGLKAPNNKLKYEKIGMTKQKLNPDDLLLNNAIPYQFATYLKYARSLKFDEDPDYDYLISLMDDALRLNDLKDDGHYDWMDLNGGKGWNIKINRRANLHGYGNPNPRVNGNTARNNVNTNSKTRNTTPVATPKQQAQNSYNKDNSKSRISSNPQSFTKQQHVLKKIEPNSKYIPETHSNLQRPIKSQSQTYDSISHTQNSPFVPYSSSKANPKRSNNEHNLPNHYTNLANKNINYQSQRNYEQENDAYSDDENDTFCSKIYKYCCCCFCCC

SEQ ID NO: 247 - protein, 417 aa, Physcomitrella patens
MDSGGDRVRAPQKQSREEDQYRSLNIATEHRQHIQKHQQHQQQPGTGLVVETLQKTLCNVTVTSPTSSPEGGRLRTVANKYAVEGMVGSGAFCKVYQGSDLTNHEVVGIKLEDTRTEHAQLMHESRLYNILRGGKGVPNMRWFGKEQDYNVMVLDLLGPNLLHLFKVCGQRFSLKTVIMLGYQMIDRVEYVHSRGLVHRDLKPDNFLMGCGRQGNQVFIIDFGLAKEYIDPATRRHIPYRDRKSFTGTARYASRNQHKGIEHSRRDDIESLGYILMYFLRGNLPWQGQGGQRFTDQKQHEYMHNKIKMETTIEDLCDGYPRQFADFLHHARELGFYEQPDYSYLRSLFRDLFIQKKFQLDHVYDWTVYTQPPQNGSAQTVRSPAAGPQTHLQSRPSNVSYCPPLTKPEFRREVVAAN

SEQ ID NO: 248 - protein, 484 aa, Physcomitrella patens
MEPRVGNKYRLGRKIGSGSFGEIYLGTNVQTNEEVGIKLESIKTKHPQLLYESKLYRILQGGTGIPNIRWFGIEGDYNVLVLDLLGPSLEDLFNFCSRKFSLKTVLMLADQLINRVEYVHAKSFLHRDIKPDNFLMGLGRRANQVYIIDFGLAKKYRDPSTHQHIPYRENKNLTGTARYASINTHLGIEQSRRDDLESLGYVLMYFLRGSLPWQGLKAGTKKQKYEKISEKKMSTPIEVLCKNYPSEFASYFHYCRSLRFDDKPDYAYLKRIFRDLFIREGFQFDYVFDWTILKYQQSQISGGSSTRLGASAGQTSGALGTGATGSRDLQRPTEPMDPSRRRLPGGANGSGVANALDSSKHKSPGLDESAKDSALAVVSEPERMHTSSYATRGGSSSRRAVLSSSRPSGASAEVVDSSRTGSSKLGPTSLRSSAGMQRSSPVTSDPKRISSRHPQPPSANLRIYEAAIKGVESLSVEVDQSRYK

SEQ ID NO: 249 - protein, 747 aa, Physcomitrella patens
MEACNCVEPQWPPDDLLMRYQYISDFFIALAYFSIPLELIYFVKKSSIFPYRWVLVQFGAFIVLCGATHLISLWTFSSRSRTVAVVLTIAKVLTAVVSCATALMLVHIIPDLLSVKTRELFLKKKAAELDREMGLIRTQEETGRHVRMLTHEIRSTLDRHTILNTTLIELGKTLSLEECTLWMPSPDGQELQLKNALRAESLHVTVPIHHPTIKQVFSTPRAVVISPNSPVCVTRIRGAKYMTGEVVAIRVPLLHLTNFHFSDWPDAGTRPFALMVLMLPLNSARRWHVHELELVEVVADQVAVALSHATILEESMPARDLLMEQNVALEHARQEAETAIRARNDFLAVMNHEMRTPMHAIIALSSLLQETELTPEQRSMVETVLKSSNLLATLINDVLDLSRLEDGSLELDIQTFNLPNVFKEVLNLVKPIASVKRLQVNLTMGPDIPEIAVGDDKRLLQTALNVVGNAVKFTKEGHVNVIVGLERPEYPRDPRQPDFRPLSGDNHFYLRVQVRDTGLGLNPQDIPMLFNKFVQADSTTTRNYGGTGLGLAICKRFVNLMDGHIWIESEGVGRGPIVTFIVKLNLPETSSHLSIHIAPTSQPSGSQSRTDFSGVRILVTDDNGVNRMVTRGLLMRLGREVTLAASGRECLQLIQQRNQAFNVLLLDVCMPEMDGYEVATQIQKRLTRRDRPLLVALTANTDRITHEKCLRLGMDGVVTKPISLEKMRLVLTELLERGSISELTQRL

SEQ ID NO: 250 - protein, 575 aa, Physcomitrella patens
MGNTCVGAAGYFQGFTSAIALGGRSSRSNSERSPTASKIDDSDRKVEVDTPATQQNPPRQNHIPSVDTADQQQFKEVIEAMKKGREIKSVSGQSLTHSVLQRKTENLRDLYILGKKLGQGQFGTTYLCIEKATNKEYACKSIAKRKLISKEDVEDVRRELQIMHHLSGHPNIVMIKGAYEDPASVHLVVELCAGGELFDRIIQRGQYSEAKAAVLTRTIVGVVETCHSLGVMHRDLKPENFLFSSTKEDAALKTTDFGLSVFFKPGEVFRDVVGSPYYVAPEVLRKNYGPEADVWSAGVILYILLSGVPPFWAETEQGIFEQVLKSELDFASDPWPKISDSAKDLIRKMLNPQASKRLKAHQVLCHPWICEDGVAPDRPIDSAVQSRLKHFSAMNKLKKIAIRVIAESLSEEEIAGLKEMFKMMDTDNSGSISYDELKAGLKKVGSILKEEDIRQLMDAADVDGNGTIDYGEFLAATLHLNKIERDENMLAAFSYLDKDNSGYLTIDELQHALAQFNMGDISVDELLHEVDQNNDGQIDYAEFVTMMRKGNPGAAGRSSFRNSQSLSLNDVLMMG

SEQ ID NO: 251 - protein, 253 aa, Physcomitrella patens
MERRTVAAHPWHDLEIGPQAPAIFNCVIEIGKGSKVKYELDKKSGLIKVDRILYSSVVYPHNYGFIPRTLCEDEDPIDVLVIMQEPVLPGCFLRARAIGLMPMIDQGEKDDKIIAVCADDPEYGDFKDIKEPPPHRLAEIRRFFEDYKKNENKSVAVDEFLGHEAAIAAIGHSMDLYASYIVESLRQSHAPVPNKTISRTESSKMMCGSSLRHRLRSERKSLLKEEVQEEPIAGQISDSSLQSMATEVQNGSS

SEQ ID NO: 252 - protein, 462 aa, Physcomitrella patens
MEIPLGRDGEGMQSKQCPRGHWRPAEDDKLRELVSQFGPQNWNLIAEKLQGRSGKSCRLRWFNQLDPRINRHPFSEEEEERLLIAHKRYGNKWALIARLFPGRTDNAVKNHWHVVTARQSRERTRTYGRIKGPVHRRGKGNRINTSALGNYHHDSKGALTAWIESKYATVEQSAEGLARSPCTGRGSPPLPTGFSIPQISGGAFHRPTNMSTSPLSDVTIESPKFSNSENAQIITAPVLQKPMGDPRSVCLPNSTVSDKQQVLQSNSIDGQISSGLQTSAIVAHDEKSGVISMNHQAPDMSCVGLKSNFQGSLHPGAVRSSWNQSLPHCFGHSNKLVEECRSSTGACTERSEILQEQHSSLQFKCSTAYNTGRYQHENLCGPAFSQQDTANEVANFSTLAFSGLVKHRQERLCKDSGSALKLGLSWVTSDSTLDLSVAKMSASQPEQSAPVAFIDFLGVGAA

SEQ ID NO: 253 - protein, 779 aa, Medicago truncatula
MAAESFQVATSSLCSLNGSHRKPTLLSPLRFMGTCFRPVQSRSFSSSSLSQFFRTSPIKPTSPQLVRTRRNFSVFAMSTPDEAKRAVPLKDYRNIGIMAHIDAGKTTTTERILFYTGRNYKIGEVHEGTATMDWMEQEQERGITITSAATTTFWDNHRINIIDTPGHVDFTLEVERALRVLDGAICLFDSVAGVEPQSETVWRQADRYGVPRICFVNKMDRLGANFFRTRDMIVTNLGAKPLVLQLPIGAEDSFKGVIDLVRMKAIVWGGEELGAKFTYEDIPVDLLEQAQDYRSQMIETIVELDDEAMENYLEGVEPDEATIKKLIRKGSIAATFVPVMCGSAFKNKGVQPLLDAVVDYLPSPLDVPPMKGTDPENPEATIERIAGDDEPFSGLAFKIMSDSFVGSLTFVRVYSGKLTAGSYVLNSNKGKKERIGRLLEMHANSREDVKVALTGDIVALAGLKDTITGETLCDPESPVVLERMDFPDPVIKIAIEPKTKADIDKMAAGLVKLAQEDPSFHFSRDEEINQTVIEGMGELHLEIIVDRLKREYKVEANVGAPQVNYRESISKIHEARYVHKKQSGGQGQFADITVRFEPMEPGSGYEFKSEIKGGAVPKEYIPGVVKGLEECMSNGVLAGFPVVDVRAVLVDGSYHDVDSSVLAFQLAARGAFREGIRKAGPRMLEPIMKVEVVTPEEHLGDVIGDLNSRRGQINSFGDKPGGLKVVDSLVPLAEMFQYVSTLRGMTKGRASYSMQLAMFDVVPQHIQNQLATKVQEVSA

SEQ ID NO: 254 - protein, 796 aa, Escherichia coli
MAINNTGSRRLLVTLTALFAALCGLYLLIGGGWLVAIGGSWYYPIAGLVMLGVAWMLWRSKRAALWLYAALLLGTMIWGVWEVGFDFWALTPRSDILVFFGIWLILPFVWRRLVIPASGAVAALVVALLISGGILTWAGFNDPQEINGTLSADATPAEAISPVADQDWPAYGRNQEGQRFSPLKQINADNVHNLKEAWVFRTGDVKQPNDPGEITNEVTPIKVGDTLYLCTAHQRLFALDAASGKEKWHYDPELKTNESFQHVTCRGVSYHEAKAETASPEVMADCPRRIILPVNDGRLIAINAENGKLCETFANKGVLNLQSNMPDTKPGLYEPTSPPIITDKTIVMAGSVTDNFSTRETSGVIRGFDVNTGELLWAFDPGAKDPNAIPSDEHTFTFNSPNSWAPAAYDAKLDLVYLPMGVTTPDIWGGNRTPEQERYASSILALNATTGKLAWSYQTVHHDLWDMDLPAQPTLADITVNGQKVPVIYAPAKTGNIFVLDRRNGELVVPAPEKPVPQGAAKGDYVTPTQPFSELSFRPTKDLSGADMWGATMFDQLVCRVMFHQMRYEGIFTPPSEQGTLVFPGNLGMFEWGGISVDPNREVAIANPMALPFVSKLIPRGPGNPMEQPKDAKGTGTESGIQPQYGVPYGVTLNPFLSPFGLPCKQPAWGYISALDLKTNEVVWKKRIGTPQDSMPFPMPVPVPFNMGMPMLGGPISTAGNVLFIAATADNYLRAYNMSNGEKLWQGRLPAGGQATPMTYEVNGKQYVVISAGGHGSFGTKMGDYIVAYALPDDVK

SEQ ID NO: 255 - protein, 443 aa, Escherichia coli
MSTSDSIVSSQTKQSSWRKSDTTWTLGLFGTAIGAGVLFFPIRAGFGGLIPILLMLVLAYPIAFYCHRALARLCLSGSNPSGNITETVEEHFGKTGGVVITFLYFFAICPLLWIYGVTITNTFMTFWENQLGFAPLNRGFVALFLLLLMAFVIWFGKDLMVKVMSYLVWPFIASLVLISLSLIPYWNSAVIDQVDLGSLSLTGHDGILITVWLGISIMVFSFNFSPIVSSFVVSKREEYEKDFGRDFTERKCSQIISRASMLMVAVVMFFAFSCLFTLSPANMAEAKAQNIPVLSYLANHFASMTGTKTTFAITLEYAASIIALVAIFKSFFGHYLGTLEGLNGLVLKFGYKGDKTKVSLGKLNTISMIFIMGSTWVVAYANPNILDLIEAMGAPIIASLLCLLPMYAIRKAPSLAKYRGRLDNVFVTVIGLLTILNIVYKLF

SEQ ID NO: 256 - protein, 336 aa, Escherichia coli
MSALNKKSFLTYLKEGGIYVVLLVLLAIIIFQDPTFLSLLNLSNILTQSSVRIIIALGVAGLIVTQGTDLSAGRQVGLAAVVAATLLQSMDNANKVFPEMATMPIALVILIVCAIGAVIGLINGLIIAYLNVTPFITTLGTMIIVYGINSLYYDFVGASPISGFDSGFSTFAQGFVALGSFRLSYITFYALIAVAFVWVLWNKTRFGKNIFAIGGNPEAAKVSGVNVGLNLLMIYALSGVFYAFGGMLEAGRIGSATNNLGFMYELDAIAACVVGGVSFSGGVGTVIGVVTGVIIFTVINYGLTYIGVNPYWQYIIKGAIIIFAVALDSLKYARKK

SEQ ID NO: 257 - protein, 383 aa, Escherichia coli
MMANRMILNETAWFGRGAVGALTDEVKRRGYQKALIVTDKTLVQCGVVAKVTDKMDAAGLAWAIYDGVVPNPTITVVKEGLGVFQNSGADYLIAIGGGSPQDTCKAIGIISNNPEFADVRSLEGLSPTNKPSVPILAIPTTAGTAAEVTINYVITDEEKRRKFVCVDPHDIPQVAFIDADMMDGMPPALKAATGVDALTHAIEGYITRGAWALTDALHIKAIEIIAGALRGSVAGDKDAGEEMALGQYVAGMGFSNVGLGLVHGMAHPLGAFYNTPHGVANAILLPHVMRYNADFTGEKYRDIARVMGVKVEGMSLEEARNAAVEAVFALNRDVGIPPHLRDVGVRKEDIPALAQAALDDVCTGGNPREATLEDIVELYHTAW

SEQ ID NO: 258 - protein, 72 aa, Escherichia coli
MFHCPLCQHAAHARTSRYITDTTKERYHQCQNVNCSATFITYESVQRYIVKPGEVHVVRPHPLPSGQQIMWM

SEQ ID NO: 259 - protein, 226 aa, Escherichia coli
MIRSHTMTITSLDGYRWLKNDIIRGNFQPDEKLRMSLLTSRYALGVGPLREALSQLVAERLVTVVNQKGYRVASMSEQELLDIFDARANMEAMLVSLAIARGGDEWEADVLAKAHLLSKLEACDASEKMLDEWDLRHQAFHTAIVAGCGSHYLLQMRERLFDLAARYRFIWLRRTVLSVEMLEDKHDQHQTLTAAVLARDTARASELMRQHLLTPIPIIQQAMAGN

SEQ ID NO: 260 - protein, 682 aa, Escherichia coli
MNMFFRLTALAGLLAIAGQTFAVEDITRADQIPVLKEETQHATVSERVTSRFTRSHYRQFDLDQAFSAKIFDRYLNLLDYSHNVLLASDVEQFAKKKTELGDELRSGKLDVFYDLYNLAQKRRFERYQYALSVLEKPMDFTGNDTYNLDRSKAPWPKNEAELNALWDSKVKFDELSLKLTGKTDKEIRETLTRRYKFAIRRLAQTNSEDVFSLAMTAFAREIDPHTNYLSPRNTEQFNTEMSLSLEGIGAVLQMDDDYTVINSMVAGGPAAKSKAISVGDKIVGVGQTGKPMVDVIGWRLDDVVALIKGPKGSKVRLEILPAGKGTKTRTVTLTRERIRLEDRAVKMSVKTVGKEKVGVLDIPGFYVGLTDDVKVQLQKLEKQNVSSVIIDLRSNGGGALTEAVSLSGLFIPAGPIVQVRDNNGKVREDSDTDGQVFYKGPLVVLVDRFSASASEIFAAAMQDYGRALVVGEPTFGKGTVQQYRSLNRIYDQMLRPEWPALGSVQYTIQKFYRVNGGSTQRKGVTPDIIMPTGNEETETGEKFEDNALPWDSIDAATYVKSGDLTAFEPELLKEHNARIAKDPEFQNIMKDIARFNAMKDKRNIVSLNYAVREKENNEDDATRLARLNERFKREGKPELKKLDDLPKDYQEPDPYLDETVNIALDLAKLEKARPAEQPAPVK

SEQ ID NO: 261 - protein, 240 aa, Escherichia coli
MGHKPLYRQIADRIREQIARGELKPGDALPTESALQTEFGVSRVTVRQALRQLVEQQILESIQGSGTYVKEERVNYDIFQLTSFDEKLSDRHVDTHSEVLIFEVIPADDFLQQQLQITPQDRVWHVKRVRYRKQKPMALEETWMPLALFPDLTWQVMENSKYHFIEEVKKMVIDRSEQEIIPLMPTEEMSRLLNISQTKPILEKVSRGYLVDGRVFEYSRNAFNTDDYKFTLIAQRKSSR

SEQ ID NO: 262 - protein, 478 aa, Brassica napus
MANTTSLVSDFLSFLNASPTAFHAVDESKRRLRHAGYEQISERDDWKLEAGKKYFFTRNYSTIVAFAVGKKYEAGNGFHIIGAHTDSPCLKLKPVSKVTKGGCLEVGVQTYGGGLWYTWFDRDLTVAGRVIVKEDKAGSVSYSHRLVRIEDPIMRIPTLAIHLDRNVNSEGFKPNTQTHLVPILATAIKAELNKVPAEGGEEDGEKKCTESSSKSKHHPLLMEIIANALGCNPDEICEFELQVCDTQPSILGGAAKEFIFSGRLDNLCMSFCSLKALIDATSSGSDLEEESGVRMVALFDHEEVGSNSAQGAGSPVMIDAMSHITSCFSSDAKVLKKAIQKSLLVSADMAHALHPNFMDKHEENHQPKMHGGLVIKHNANQRYATNAVTSFVFREIAEKHNLPVQDFVVRNDMGCGSTIGPILASSVGIRTVDVGAPQLSMHSIREMCAADDVKHSYEHFKAFFQEFTHLDAKLTVDV

SEQ ID NO: 263 - protein, 514 aa, Saccharomyces cerevisiae
MEEQREILEQLKKTLQMLTVEPSKNNQIANEEKEKKENENSWCILEHNYEDIAQEFIDFIYKNPTTYHVVSFFAELLDKHNFKYLSEKSNWQDSIGEDGGKFYTIRNGTNLSAFILGKNWRAEKGVGVIGSHVDALTVKLKPVSFKDTAEGYGRIAVAPYGGTLNELWLDRDLGIGGRLLYKKKGTNEIKSALVDSTPLPVCRIPSLAPHFGKPAEGPFDKEDQTIPVIGFPTPDEEGNEPPTDDEKKSPLFGKHCIHLLRYVAKLAGVEVSELIQMDLDLFDVQKGTIGGIGKHFLFAPRLDDRLCSFAAMIALICYAKDVNTEESDLFSTVTLYDNEEIGSLTRQGAKGGLLESVVERSSSAFTKKPVDLHTVWANSIILSADVNHLYNPNFPEVYLKNHFPVPNVGITLSLDPNGHMATDVVGTALVEELARRNGDKVQYFQIKNNSRSGGTIGPSLASQTGARTIDLGIAQLSMHSIRAATGSKDVGLGVKFFNGFFKHWRSVYDEFGEL

SEQ ID NO: 264 - protein, 192 aa, Saccharomyces cerevisiae
MSEKAVRRKLVIIGDGACGKTSLLYVFTLGKFPEQYHPTVFENYVTDCRVDGIKVSLTLWDTAGQEEYERLRPFSYSKADIILIGFAVDNFESLINARTKWADEALRYCPDAPIVLVGLKKDLRQEAHFKENATDEMVPIEDAKQVARAIGAKKYMECSALTGEGVDDVFEVATRTSLLMKKEPGANCCIIL

SEQ ID NO: 265 - protein, 198 aa, Brassica napus
MSASRFIKCVTVGDGAVGKTCLLISYTSNTFPTDYVPTVFDNFSANVIVDGNTINLGLWDTAGQEDYNRLRPLSYRGADVFLLAFSLVSKASYENVSKKWVPELRHYAPGVPIILVGTKLDLRDDKQFFVEHPGAVPISTAQGEELKKVIGAPAYIECSAKTQQNVKAVFDAAIKVVLQPPKNKKRKKRKSQKACSIL

SEQ ID NO: 266 - protein, 731 aa, Escherichia coli
MGQGFPPCPVFLLPRNGFALMKSMNIAASSELVSRLSSHRRVVALGDTDFTDVAAVVITAADSRSGILALLKRTGFHLPVFLYSEHAVELPAGVTAVINGNEQQWLELESAACQYEENLLPPFYDTLTQYVEMGNSTFACPGHQHGAFFKKHPAGRHFYDFFGENVFRADMCNADVKLGDLLIHEGSAKDAQKFAAKVFHADKTYFVLNGTSAANKVVTNALLTRGDLVLFDRNNHKSNHHGALIQAGATPVYLEASRNPFGFIGGIDAHCFNEEYLRQQIRDVAPEKADLPRPYRLAIIQLGTYDGTVYNARQVIDTVGHLCDYILFDSAWVGYEQFIPMMADSSPLLLELNENDPGIFVTQSVHKQQAGFSQTSQIHKKDNHIRGQARFCPHKRLNNAFMLHASTSPFYPLFAALDVNAKIHEGESGRRLWAECVEIGIEARKAILARCKLFRPFIPPVVDGKLWQDYPTSVLASDRRFFSFEPGAKWHGFEGYAADQYFVDPCKLLLTTPGIDAETGEYSDFGVPATILAHYLRENGIVPEKCDLNSILFLLTPAESHEKLAQLVAMLAQFEQHIEDDSPLVEVLPSVYNKYPVRYRDYTLRQLCQEMHDLYVSFDVKDLQKAMFRQQSFPSVVMNPQDAHSAYIRGDVELVRIRDAEGRIAAEGALPYPPGVLCVVPGEVWGGAVQRYFLALEEGVNLLPGFSPELQGVYSETDADGVKRLYGYVLK

SEQ ID NO: 267 - protein, 353 aa, Escherichia coli
MAIDENKQKALAAALGQIEKQFGKGSIMRLGEDRSMDVETISTGSLSLDIALGAGGLPMGRIVEIYGPESSGKTTLTLQVIAAAQREGKTCAFIDAEHALDPIYARKLGVDIDNLLCSQPDTGEQALEICDALARSGAVDVIVVDSVAALTPKAEIEGEIGDSHMGLAARMMSQAMRKLAGNLKQSNTLLIFINQIRMKIGVMFGNPETTTGGNALKFYASVRLDIRRIGAVKEGENVVGSETRVKVVKNKIAAPFKQAEFQILYGEGINFYGELVDLGVKEKLIEKAGAWYSYKGEKIGQGKANATAWLKDNPETAKEIEKKVRELLLSNPNSTPDFSVDDSEGVAETNEDF

SEQ ID NO: 268 - protein, 475 aa, Arabidopsis thaliana
MTSKMEPVSSWGNTSLVSVDPEIHDLIEKEKRRQCRGIELIASENFTSFAVIEALGSALTNKYSEGIPGNRYYGGNEFIDEIENLCRSRALEAFHCDPAAWGVNVQPYSGSPANFAAYTALLQPHDRIMGLDLPSGGHLTHGYYTSGGKKISATSIYFGSLPYKVNFTTGYIDYDKLEEKALDFRPKLLICGGSAYPRDWDYARFRAIADKVGALLLCDMAHISGLVAAQEAANPFEYCDVVTTTTHKSLRGPRAGMIFYRKGPKPPKKGQPEGAVYDFEDKINFAVFPALQGGPHNHQIGALAVALKQANTPGFKVYAKQVKANAVALGNYLMSKGYQIVTNGTENHLVLWDLRPLGLTGNKVEKLCDLCSITLNKNAVFGDSSALAPGGVRIGAPAMTSRGLVEKDFEQIGEFLSRAVTLTLDIQKTYGKLLKDFNKGLVNNKDLDQLKADVEKFSASYEMPGFLMSEMKYQD

SEQ ID NO: 269 - protein, 403 aa, Arabidopsis thaliana
MTVVREYDPTRDLVGVEDVERRCEVGPSGKLSLFTDLLGDPICRIRHSPSYLMLVAEMGTEKKEIVGMIRGCIKTVTCGQKLDLNHKSQNDVVKPLYTKLAYVLGLRVSPFHRRQGIGFKLVKMMEEWFRQNGAEYSYIATENDNQASVNLFTGKCGYSEFRTPSILVNPVYAHRVNVSRRVTVIKLEPVDAETLYRIRFSTTEFFPRDIDSVLNNKLSLGTFVAVPRGSCYGSGSGSWPGSAKFLEYPPESWAVLSVWNCKDSFLLEVRGASRLRRVVAKTTRVVDKTLPFLKLPSIPSVFEPFGLHFMYGIGGEGPRAVKMVKSLCAHAHNLAKAGGCGVVAAEVAGEDPLRRGIPHWKVLSCDEDLWCIKRLGDDYSDGVVGDWTKSPPGVSIFVDPREF

SEQ ID NO: 270 - protein, 647 aa, Arabidopsis thaliana
MITGKDMYDVLAAMVPLYVAMILAYGSVRWWGIFTPDQCSGINRFVAVFAVPLLSFHFISSNDPYAMNYHFLAADSLQKVVILAALFLWQAFSRRGSLEWMITLFSLSTLPNTLVMGIPLLRAMYGDFSGNLMVQIVVLQSIIWYTLMLFLFEFRGAKLLISEQFPETAGSITSFRVDSDVISLNGREPLQTDAEIGDDGKLHVVVRRSSAASSMISSFNKSHGGGLNSSMITPRASNLTGVEIYSVQSSREPTPRASSFNQTDFYAMFNASKAPSPRHGYTNSYGGAGAGPGGDVYSLQSSKGVTPRTSNFDEEVMKTAKKAGRGGRSMSGELYNNNSVPSYPPPNPMFTGSTSGASGVKKKESGGGGSGGGVGVGGQNKEMNMFVWSSSASPVSEANAKNAMTRGSSTDVSTDPKVSIPPHDNLATKAMQNLIENMSPGRKGHVEMDQDGNNGGKSPYMGKKGSDVEDGGPGPRKQQMPPASVMTRLILIMVWRKLIRNPNTYSSLFGLAWSLVSFKWNIKMPTIMSGSISILSDAGLGMAMFSLGLFMALQPKIIACGKSVAGFAMAVRFLTGPAVIAATSIAIGIRGDLLHIAIVQAALPQGIVPFVFAKEYNVHPDILSTAVIFGMLVALPVTVLYYVLLGL

SEQ ID NO: 271 - protein, 219 aa, Physcomitrella patens subsp. patens
MAVHLLLSLALTTKFWRSIHPGGRGCNWGKPKTKKWDPCGGKVKEQALQLTTKIESPKVKKEVEESKSESSLEEESKGMRLAAKDTSGRNAFKFRNIDLNKAPSAWDTEEVSASNTGDTTSFRGVRHRPELNKWVTEIRPTSQKRKIWLGTYETPEEAARAYDVGIFYTKKKIPYNFEDSPQQLQLYPIPPELPWESFAALVKQRATSAAKRARVPSSS

SEQ ID NO: 272 - protein, 277 aa, Physcomitrella patens subsp. patens
MGSIRSCWGVGGATRSSLLASKLNRAPIGLMAWWSLVVCFRIWVWFKAFKGLIANVVARALGWSWWASSSIRARTLEVSASSGRLGRPKSKNWWDPCGGGKAREQGLQLPSKIDSARVKNEVDESKSESSQEEERKGMRLAARDDSGQNALKFRNIDLNKVPSAWDSDDVSVGTGDTTIFRGVRHRPELNKWVTEIRPTSQKRKIWLGTYETPEEAARAYDVGIFYTKKKIPYNFEDSPQQLQLYPIPPELPWESFAALVKQRATSAAKRARVPSSG

SEQ ID NO: 273 - protein, 221 aa, Physcomitrella patens subsp. patens
MEKPSLSKLAVHVVNLLSGAFFLRERALGKPKAKNCWDPCGGGKIREQGLQLSSSIGTSRVKIELEGSKSDSSVEEESKGMRLAAKDTSGRNAYKYRNIDLNKAPSTWDADEVTVSSTNDTTNFRGVRHRPELNKWVTEIRPTSQKRKIWLGTYETPEEAARAYDVGIFYTKKKIPYNFEDSPKKLQQLPIPPELPWESFAAVVKQRATSAAKRARVPSSS

SEQ ID NO: 274 - protein, 140 aa, Artificial sequence
  consensus sequence
  Variant (6)..(6): Xaa in position 6 is any amino acid
  Variant (8)..(8): Xaa in position 8 is any amino acid
  Variant (11)..(11): Xaa in position 11 is any amino acid
  Variant (14)..(14): Xaa in position 14 is any amino acid
  Variant (16)..(16): Xaa in position 16 is any amino acid
  Variant (24)..(24): Xaa in position 24 is any amino acid
  Variant (27)..(27): Xaa in position 27 is any amino acid
  Variant (30)..(32): Xaa in position 30 to 32 is any amino acid
  Variant (34)..(36): Xaa in position 34 to 36 is any amino acid
  Variant (37)..(37): Xaa in position 37 is any or no amino acid
  Variant (39)..(39): Xaa in position 39 is any amino acid
  Variant (43)..(43): Xaa in position 43 is any amino acid
  Variant (104)..(105): Xaa in position 104 to 105 is any amino acid
  Variant (108)..(109): Xaa in position 108 to 109 is any amino acid
  Variant (123)..(123): Xaa in position 123 is any amino acid
MRLAAXDXSGXNAXKXRNIDLNKXPSXWDXXXVXXXXTXDTTXFRGVRHRPELNKWVTEIRPTSQKRKIWLGTYETPEEAARAYDVGIFYTKKKIPYNFEDSPXXLQXXPIPPELPWESFAAXVKQRATSAAKRARVPSS

SEQ ID NO: 275 - protein, 60 aa, Artificial sequence
  protein pattern
FRGVRHRPELNKWVTEIRPTSQKRKIWLGTYETPEEAARAYDVGIFYTKKKIPYNFEDSP

SEQ ID NO: 276 - protein, 38 aa, Artificial sequence
  protein pattern
  Variant (3)..(3): Xaa in position 3 is Lys or Arg
  Variant (5)..(5): Xaa in position 5 is Asp or Thr
  Variant (8)..(8): Xaa in position 8 is Gln or Arg
  Variant (11)..(11): Xaa in position 11 is any amino acid
  Variant (13)..(13): Xaa in position 13 is Phe or Tyr
  Variant (21)..(21): Xaa in position 21 is Ala or Val
  Variant (24)..(24): Xaa in position 24 is Ala or Thr
  Variant (27)..(27): Xaa in position 27 is Ala, Ser or Thr
  Variant (28)..(29): Xaa in position 28 to 29 is Asp or Glu
  Variant (31)..(32): Xaa in position 31 to 32 is any or no amino acid
  Variant (34)..(34): Xaa in position 34 is Ala, Asn, Ser or Val
  Variant (35)..(35): Xaa in position 35 is Gly, Ser or Thr
  Variant (36)..(36): Xaa in position 36 is Gly, Asn or Thr
  Variant (37)..(38): Xaa in position 37 to 38 is Asp, Gly or Thr
AAXDXSGXNAXKXRNIDLNKXPSXWDXXXVXXSXXXXX

SEQ ID NO: 277 - protein, 27 aa, Artificial sequence
  protein pattern
  Variant (3)..(4): Xaa in position 3 to 4 is any amino acid
  Variant (18)..(18): Xaa in position 18 is Leu or Val
LQXXPIPPELPWESFAAXVKQRATSAA

1-28. (canceled)

29. A method for increasing plant health and/or controlling pests in plants with at least one transgenic modification related to yield increase as compared to a corresponding wild-type plant comprising treating the location where the plant with at least one transgenic modification is growing or is expected to grow and/or the transgenic plant with at least one transgenic modification or propagation material of the plant with at least one transgenic modification with an effective amount of a chemical composition comprising at least one active ingredient (B).

30. The method of claim 29, whereby at least one transgenic modification of said plant does not confer resistance to the active ingredient which is employed.

31. The method of claim 29, whereby the method is a method for increasing plant health.

32. The method of claim 29, whereby the method is a method for controlling pests.

33. The method of claim 29, wherein the active ingredient (B) is selected from the group consisting of insecticides, fungicides or herbicides.

34. The method of claim 29, wherein the active ingredient (B) is a pesticide selected from the group consisting of insecticides and fungicides.

35. The method of claim 29, wherein the active ingredient (B) is an insecticide selected from the group consisting of acephate, chlorpyrifos, diazinon, dichlorvos, dimethoate, fenitrothion, methamidophos, methidathion, methyl-parathion, monocrotophos, phorate, profenofos, terbufos, aldicarb, carbaryl, carbofuran, carbosulfan, methomyl, thiodicarb, bifenthrin, cyfluthrin, cypermethrin, alpha-cypermethrin, zeta-cypermethrin, deltamethrin, esfenvalerate, lambda-cyhalothrin, permethrin, tefluthrin, diflubenzuron, flufenoxuron, lufenuron, teflubenzuron, spirotetramat; clothianidin, dinotefuran, imidacloprid, thiamethoxam, acetamiprid, thiacloprid; endosulfan, fipronil, abamectin, emamectin, spinosad, spinetoram, hydramethylnon; chlorfenapyr; fenbutatin oxide, indoxacarb, metaflumizone, flonicamid, flubendiamide, chlorantraniliprole, cyazypyr (HGW86), cyflumetofen.

36. The method of claim 29, wherein the active ingredient (B) is a fungicide selected from the group consisting of azoxystrobin, dimoxystrobin, kresoxim-methyl, orysastrobin, pyraclostrobin, trifloxystrobin, bixafen, boscalid, isopyrazam, metalaxyl, penthiopyrad, 3-difluoromethyl-1-methyl-1H-pyrazole-4-carboxylic acid (2′,4′,5′-trifluorobiphenyl-2-yl)-amide, N-(2-bicyclopropyl-2-yl-phenyl)-3-difluoromethyl-1-methyl-1H-pyrazole-4-carboxylic acid amide, dimethomorph, fluopicolide, difenoconazole, epoxiconazole, fluquinconazole, flusilazole, flutriafol, metconazol, myclobutanil, propiconazole, prothioconazole, tebuconazole, tetraconazole, triticonazole, prochloraz, carbendazim, fluazinam, cyprodinil, pyrimethanil, fludioxonil, dodemorph, fenpropimorph, tridemorph, fenpropidin, iprodione, vinclozolin, famoxadone, probenazole, captan, folpet, 5-ethyl-6-octyl-[1,2,4]triazolo[1,5-a]pyrimidine-7-ylamine, mancozeb, maneb, metiram, thiram, dithianon, fosetyl, fosetyl-aluminium, chlorothalonil, thiophanate methyl, cymoxanil, metrafenone, spiroxamine, bixafen, N-(3′,4′,5′-trifluorobiphenyl-2-yl)-3-difluoromethyl-1-methyl-1H-pyrazole-4-carboxamide, N-[2-(4′-trifluoromethylthio)-biphenyl]-3-difluoromethyl-1-methyl-1H-pyrazole-4-carboxamide, N-[2-(1,3-dimethylbutyl)-phenyl]-1,3-dimethyl-5-fluoro-1H-pyrazole-4-carboxamide, N-(2-bicyclopropyl-2-yl-phenyl)-3-difluoromethyl-1-methyl-1H-pyrazole-4-carboxamide, N-(cis-2-bicyclopropyl-2-yl-phenyl)-3-difluoromethyl-1-methyl-1H-pyrazole-4-carboxamide, N-(trans-2-bicyclopropyl-2-yl-phenyl)-3-difluoromethyl-1-methyl-1H-pyrazole-4-carboxamide, N-[1,2,3,4-tetrahydro-9-(1-methylethyl)-1,4-methanonaphthalen-5-yl]-3-(difluoromethyl)-1-methyl-1H-pyrazole-4-carboxamide.

37. The method of claim 29, wherein the active ingredient (B) is a herbicide selected from the group consisting of acetochlor, dimethenamid, metolachlor, metazachlor, glyphosate, glufosinate, sulfosate, clodinafop, fenoxaprop, fluazifop, haloxyfop, paraquat, phenmedipham, clethodim, cycloxydim, profoxydim, sethoxydim, tepraloxydim, pendimethalin, trifluralin, acifluorfen, bromoxynil, imazamethabenz, imazamox, imazapic, imazapyr, imazaquin, imazethapyr, 2,4-D, chloridazon, clopyralid, fluoroxypyr, picloram, picolinafen, bensulfuron, chlorimuron ethyl, cyclosulfamuron, iodosulfuron, mesosulfuron, metsulfuron-methyl, nicosulfuron, rimsulfuron, triflusulfuron, atrazine, hexazinone, diuron, florasulam, pyroxasulfone, bentazone, cinidon-ethly, cinmethylin, dicamba, diflufenzopyr, quinclorac, quinmerac, mesotrione, saflufenacil, topramezone.

38. The method of claim 29, wherein the active ingredient (B) is a strobilurin selected from pyraclostrobin, kresoxim-methyl, dimoxystrobin, 2-(ortho-((2,5-dimethylphenyl-oxymethylene)phenyl)-3-methoxy-acrylic acid methyl ester, picoxystrobin, trifloxystrobin, enestroburin, orysastrobin, metominostrobin, azoxystrobin and fluoxastrobin.

39. The method of claim 29, wherein the active ingredient (B) is selected from thiamethoxam, fipronil and imidacloprid and clothianidin

40. The method of claim 29, wherein the chemical composition comprises at least one active ingredient (B) and a component (A) which is a glucan or a glucan derivative.

41. The method of claim 29, wherein at least one transgenic modification is related to yield increase as compared to a corresponding wild-type plant

42. The method of claim 29, wherein at least one transgenic modification related to yield increase as compared to a corresponding wild-type plant is a transgenic modification conferring one or more increased or generated activities selected from the group consisting of the polypeptides encoded by:
a) a nucleic acid molecule encoding the polypeptide as depicted in any of the SEQ ID NO: 1 to 270 or the homologs as depicted in SEQ ID NO: 271 to 273;
b) a nucleic acid molecule as depicted in table B, column 1 or 3;
c) a nucleic acid molecule, which, as a result of the degeneracy of the genetic code, can be derived from a polypeptide sequence as depicted in table B, column 1 or 3 and/or in SEQ ID NO: 1 to 270;
d) a nucleic acid molecule having at least 30% identity with the nucleic acid molecule sequence of a polynucleotide comprising the nucleic acid molecule according to a) to c);
e) a nucleic acid molecule encoding a polypeptide having at least 30% identity with the amino acid sequence of the polypeptide encoded by the nucleic acid molecule of (a) to (c) and having the activity represented by a nucleic acid molecule of (a) to (c);
f) nucleic acid molecule which hybridizes with a nucleic acid molecule of (a) to (c) under stringent hybridization conditions;
g) a nucleic acid molecule encoding a polypeptide which can be isolated with the aid of monoclonal or polyclonal antibodies made against a polypeptide encoded by one of the nucleic acid molecules of (a) to (e) and having the activity represented by the nucleic acid molecule comprising a polynucleotide of (a) to (c);
h) a nucleic acid molecule encoding a polypeptide comprising the consensus sequence or one or more polypeptide motifs resulting from 2 or more of the polypeptides as depicted in table B, column 1 or 3 and/or in SEQ ID NO: 1 to 270 and/or a consensus sequence as depicted in SEQ ID NO: 274 to 277;
h) a nucleic acid molecule encoding a polypeptide having the activity represented by a protein as depicted in table B, column 1 or 3 or 5 and/or SEQ ID NO: 1 to 270;
i) nucleic acid molecule which comprises a polynucleotide, which is obtained by amplifying a cDNA library or a genomic library using the primers for the polynucleotides as depicted in table B, column 1 or 3 and/or SEQ ID NO: 1 to 270 which do not start at their 5′-end with the nucleotides ATA;
and
j) a nucleic acid molecule which is obtainable by screening a suitable nucleic acid library under stringent hybridization conditions with a probe comprising a complementary sequence of a nucleic acid molecule of (a) or (b) or with a fragment thereof, having at least 15 nt, of a nucleic acid molecule complementary to a nucleic acid molecule sequence characterized in (a) to (e) and encoding a polypeptide having the activity represented by a protein comprising a polypeptide as depicted in table B, column 1 or 3 and/or SEQ ID NO: 1 to 270.

43. The method of claim 29, wherein at least one transgenic modification related to yield increase as compared to a corresponding wild-type plant is a transgenic modification conferring one or more increased or generated activities selected from the group consisting of polypeptides as depicted in SEQ ID NO: 1, 2, 3, 4, 5, 6, 7, 8, 9, 10, 11, 12, 13, 14, 15, 16, 17, 18, 19, 20, 21, 22, 23, 24, 25, 26, 27, 28, 29, 30, 31, 32, 46, 53, 266.

44. The method of claim 29, wherein the propagation material is seed.

45. The method of claim 44, wherein the transgenic seed or transgenic plant contains one or more genes which lead to an increase in plant health.

46. The method of claim 44, wherein the transgenic seed or transgenic plant contains one or more genes which lead to an increase in stress resistance.

47. The method of claim 44, wherein the transgenic seed or transgenic plant contains one or more genes which lead to an increase in pest control.

48. The method of claim 44, wherein the transgenic seed or transgenic plant contains one or more genes which lead to an increase in yield.

49. The method of claim 29, wherein the treatment(s) are carried out as foliar application.

50. The method of claim 29, wherein the treatment(s) are carried out in furrow.

51. The method of claim 29, wherein the application rate of the active compound is in the range from 0.0001 to 2000 g/ha.

52. The method of claim 29, wherein the active compound is applied to seed.

53. The method of claim 29, wherein the transgenic plant is a monocotyledonous plant.

54. The method of claim 29, wherein the transgenic plant is a dicotyledonous plant.

55. The method of claim 29, wherein the plant with the transgenic modification is selected from the group comprising maize, wheat, rye, oat, triticale, rice, barley, soybean, peanut, cotton, oilseed rape, canola/OSR, manihot, pepper, sunflower, flax, borage, sugar cane, safflower, linseed, primrose, rapeseed, turnip rape, tagetes, solanaceous plants, potato, tobacco, eggplant, tomato, lettuce, Vicia species, pea, alfalfa, coffee, cacao, tea, Salix species, oil palm, coconut, perennial grass, snip grass and forage crops.

56. The method of claim 29, wherein the plant with the transgenic modification is selected from the group consisting of maize, soybean, cotton, canola/OSR and snip grass.
